(19) United States
(12) Patent Application Publication
(10) Pub. No.: US 2007/0059744 A1
(43) Pub. Date: Mar. 15, 2007

(54) Corynebacterium glutamicum genes encoding novel proteins

(75) Inventors: Markus Pompejus, Freinsheim (DE); Burkhard Kroger, Limburgerhof (DE); Hartwig Schroder, Nussloch (DE); Oskar Zelder, Speyer (DE); Gregor Haberhauer, Limburgerhof (DE)

Correspondence Address: LAHIVE & COCKFIELD, LLP, ONE POST OFFICE SQUARE, BOSTON, MA, 02109-2127, US

(73) Assignee: BASF AG, Ludwigshafen (DE)

(21) Appl. No.: 11/507,098

(22) Filed: Aug. 17, 2006

Related U.S. Application Data
(62) Division of application No. 11/092,052, filed on Mar. 28, 2005.
Application No. 11/092,052 is a continuation of application No. 09/605,703, filed on Jun. 27, 2000, now Pat. No. 6,962,989.
(60) Provisional application No. 60/142,764, filed on Jul. 8, 1999.
(60) Provisional application No. 60/152,318, filed on Sep. 3, 1999.

(51) Int. Cl. C12Q 1/68; C07H 21/04; C12P 21/06; C12P 13/04; C12P 13/24; C12P 13/22; C12P 13/20; C12P 13/18; C12P 13/16; C12P 13/12; C12P 13/10; C12P 13/08; C12N 9/10; C12N 15/74; C12N 1/21

(52) U.S. Cl. 435/6; 536/23.2; 435/115; 435/69.1; 435/114; 435/113; 435/112; 435/111; 435/109; 435/108; 435/107; 435/106; 435/193; 435/252.3; 435/471

(57) ABSTRACT

Isolated nucleic acid molecules, designated MCP nucleic acid molecules, which encode novel MCP proteins from Corynebacterium glutamicum are described. The invention also provides antisense nucleic acid molecules, recombinant expression vectors containing MCP nucleic acid molecules, and host cells into which the expression vectors have been introduced. The invention still further provides isolated MCP proteins, mutated MCP proteins, fusion proteins, antigenic peptides and methods for the improvement of production of a desired compound from C. glutamicum based on genetic engineering of MCP genes in this organism.

### RELATED APPLICATIONS

[0001] This application is a divisional of U.S. application Ser. No. 11/092,052, filed Mar. 28, 2005, which is a continuation of U.S. application Ser. No. 09/605,703, filed Jun. 27, 2000, now U.S. Pat. No. 6,962,989, issued Nov. 8, 2005, which, in turn, claims priority to prior filed U.S. Provisional Patent Application Ser. No. 60/142,764, filed Jul. 8, 1999, and U.S. Provisional Patent Application Ser. No. 60/152,318, filed Sep. 3, 1999. The entire contents of both of the aforementioned applications are hereby expressly incorporated herein by reference.

### BACKGROUND OF THE INVENTION

[0002] Certain products and by-products of naturally-occurring metabolic processes in cells have utility in a wide array of industries, including the food, feed, cosmetics, and pharmaceutical industries. These molecules, collectively termed ‘fine chemicals’, include organic acids, both proteinogenic and non-proteinogenic amino acids, nucleotides and nucleosides, lipids and fatty acids, diols, carbohydrates, aromatic compounds, vitamins and cofactors, and enzymes. Their production is most conveniently performed through the large-scale culture of bacteria developed to produce and secrete large quantities of one or more desired molecules. One particularly useful organism for this purpose is Corynebacterium glutamicum, a gram positive, nonpathogenic bacterium. Through strain selection, a number of mutant strains have been developed which produce an array of desirable compounds. However, selection of strains improved for the production of a particular molecule is a time-consuming and difficult process.

Incorporation of Material Submitted on Compact Discs

[0003] This application incorporates herein by reference the material contained on the compact discs submitted herewith as part of this application. Specifically, the file “seqlistcorrected” (8.19 MB) contained on each of Copy 1, Copy 2 and the CRF copy of the Sequence Listing is hereby incorporated herein by reference. This file was created on Jul. 31, 2006. In addition, the files “Appendix A” (1.33 MB) and “Appendix B” (480 KB) contained on each of the compact disks entitled “Appendices Copy 1” and “Appendices Copy 2” are hereby incorporated herein by reference. Each of these files were created on Jul. 31, 2006.

### SUMMARY OF THE INVENTION

[0004] The invention provides novel bacterial nucleic acid molecules which have a variety of uses. These uses include the identification of microorganisms which can be used to produce fine chemicals, the modulation of fine chemical production in C. glutamicum or related bacteria, the typing or identification of C. glutamicum or related bacteria, as reference points for mapping the C. glutamicum genome, and as markers for transformation. These novel nucleic acid molecules encode proteins, referred to herein as marker and fine chemical production (MCP) proteins.

[0005] C. glutamicum is a gram positive, aerobic bacterium which is commonly used in industry for the large-scale production of a variety of fine chemicals, and also for the degradation of hydrocarbons (such as in petroleum spills) and for the oxidation of terpenoids. The MCP nucleic acid molecules of the invention, therefore, can be used to identify microorganisms which can be used to produce fine chemicals, e.g., by fermentation processes. Modulation of the expression of the MCP nucleic acids of the invention, or modification of the sequence of the MCP nucleic acid molecules of the invention, can be used to modulate the production of one or more fine chemicals from a microorganism (e.g., to improve the yield or production of one or more fine chemicals from a Corynebacterium or Brevibacterium species).

[0006] The MCP nucleic acids of the invention may also be used to identify an organism as being Corynebacterium glutamicum or a close relative thereof, or to identify the presence of C. glutamicum or a relative thereof in a mixed population of microorganisms. The invention provides the nucleic acid sequences of a number of C. glutamicum genes; by probing the extracted genomic DNA of a culture of a unique or mixed population of microorganisms under stringent conditions with a probe spanning a region of a C. glutamicum gene which is unique to this organism, one can ascertain whether this organism is present. Although Corynebacterium glutamicum itself is nonpathogenic, it is related to species pathogenic in humans, such as Corynebacterium diphtheriae (the causative agent of diphtheria); the detection of such organisms is of significant clinical relevance.

[0007] The MCP nucleic acid molecules of the invention may also serve as reference points for mapping of the C. glutamicum genome, or of genomes of related organisms. Similarly, these molecules, or variants or portions thereof, may serve as markers for genetically engineered Corynebacterium or Brevibacterium species.

[0008] The MCP proteins encoded by the novel nucleic acid molecules of the invention may be involved, for example, in the direct or indirect production of one or more fine chemicals from C. glutamicum. The MCP proteins of the invention may also participate in the degradation of hydrocarbons or the oxidation of terpenoids. These proteins may also be utilized for the identification of Corynebacterium glutamicum or organisms related to C. glutamicum; the presence of an MCP protein specific to C. glutamicum and related species in a mixture of proteins may indicate the presence of one of these bacteria in the sample. Further, these MCP proteins may have homologues in plants or animals which are involved in a disease state or condition; these proteins thus may serve as useful pharmaceutical targets for drug screening and the development of therapeutic compounds.

[0009] Given the availability of cloning vectors for use in Corynebacterium glutamicum, such as those disclosed in Sinskey et al., U.S. Pat. No. 4,649,119, and techniques for genetic manipulation of C. glutamicum and the related Brevibacterium species (e.g., lactofermentum) (Yoshihama et al, J. Bacteriol. 162: 591-597 (1985); Katsumata et al., J. Bacteriol. 159: 306-311 (1984); and Santamaria et al., J. Gen. Microbiol. 130: 2237-2246 (1984)), the nucleic acid molecules of the invention may be utilized in the genetic engineering of this organism to modulate the production of one or more fine chemicals. This modulation may be due to a direct effect of manipulation of a gene of the invention, or it may be due to an indirect effect of such manipulation. For example, by modifying the activity of a protein involved in the biosynthesis or degradation of a fine chemical (i.e., through mutagenesis of the corresponding gene), one may directly modulate the ability of the cell to synthesize or to degrade this compound, thereby modulating the yield and/or efficiency of production of the fine chemical. Similarly, by modulating the activity of a protein which regulates a fine chemical metabolic pathway, one may directly influence whether the production of the desired compound is up- or down-regulated, either of which will modulate the yield or efficiency of production of the fine chemical from the cell.

[0010] Indirect modulation of fine chemical production may also result by modifying the activity of a protein of the invention (i.e., by mutagenesis of the corresponding gene) such that the overall ability of the cell to grow and divide or to remain viable and productive is increased. The production of fine chemicals from C. glutamicum is generally accomplished by the large-scale fermentative culture of these microorganisms, conditions which are frequently suboptimal for growth and cell division. By engineering a protein of the invention (e.g., a stress response protein, a cell wall protein, or proteins involved in the metabolism of compounds necessary for cell growth and division to occur, such as nucleotides and amino acids) such that it is better able to survive, grow, and multiply in such conditions, it may be possible to increase the number and productivity of such engineered C. glutamicum cells in large-scale culture, which in turn should result in increased yields and/or efficiency of production of one or more desired fine chemicals. Further, the metabolic pathways of any cell are necessarily interrelated and coregulated. By altering the activity or regulation of any one metabolic pathway in C. glutamicum (i.e., by altering the activity of one of the proteins of the invention which participates in such a pathway), it is possible to concomitantly alter the activity or regulation of other metabolic pathways in this microorganism, which may be directly involved in the synthesis or degradation of a fine chemical.

[0011] The invention provides novel nucleic acid molecules which encode proteins, referred to herein as MCP proteins, which are capable of, for example, modulating the production or efficiency of production of one or more fine chemicals from C. glutamicum, or of serving as identifying markers for C. glutamicum or related organisms. Nucleic acid molecules encoding an MCP protein are referred to herein as MCP nucleic acid molecules. In a preferred embodiment, the MCP protein is capable of modulating the production or efficiency of production of one or more fine chemicals from C. glutamicum, or of serving as identifying markers for C. glutamicum or related organisms. Examples of such proteins include those encoded by the genes set forth in Table 1.

[0012] Accordingly, one aspect of the invention pertains to isolated nucleic acid molecules (e.g., cDNAs, DNAs, or RNAs) comprising a nucleotide sequence encoding an MCP protein or biologically active portions thereof, as well as nucleic acid fragments suitable as primers or hybridization probes for the detection or amplification of MCP-encoding nucleic acid (e.g., DNA or mRNA). In particularly preferred embodiments, the isolated nucleic acid molecule comprises one of the nucleotide sequences set forth in Appendix A or the coding region or a complement thereof of one of these nucleotide sequences. In other particularly preferred embodiments, the isolated nucleic acid molecule of the invention comprises a nucleotide sequence which hybridizes to or is at least about 50%, preferably at least about 60%, more preferably at least about 70%, 80% or 90%, and even more preferably at least about 95%, 96%, 97%, 98%, 99% or more homologous to a nucleotide sequence set forth in Appendix A, or a portion thereof. In other preferred embodiments, the isolated nucleic acid molecule encodes one of the amino acid sequences set forth in Appendix B. The preferred MCP proteins of the present invention also preferably possess at least one of the MCP activities described herein.

[0013] In another embodiment, the isolated nucleic acid molecule encodes a protein or portion thereof wherein the protein or portion thereof includes an amino acid sequence which is sufficiently homologous to an amino acid sequence of Appendix B, e.g., sufficiently homologous to an amino acid sequence of Appendix B such that the protein or portion thereof maintains an MCP activity. Preferably, the protein or portion thereof encoded by the nucleic acid molecule maintains the ability to modulate the production or efficiency of production of one or more fine chemicals from C. glutamicum, or of serving as an identifying marker for C. glutamicum or related organisms. In one embodiment, the protein encoded by the nucleic acid molecule is at least about 50%, preferably at least about 60%, and more preferably at least about 70%, 80%, or 90% and most preferably at least about 95%, 96%, 97%, 98%, or 99% or more homologous to an amino acid sequence of Appendix B (e.g., an entire amino acid sequence selected from those sequences set forth in Appendix B). In another preferred embodiment, the protein is a full length C. glutamicum protein which is substantially homologous to an entire amino acid sequence of Appendix B (encoded by an open reading frame shown in Appendix A).

[0014] In another preferred embodiment, the isolated nucleic acid molecule is derived from C. glutamicum and encodes a protein (e.g., an MCP fusion protein) which includes a biologically active domain which is at least about 50% or more homologous to one of the amino acid sequences of Appendix B and is able to modulate the yield, production, and/or efficiency of production of one or more fine chemicals from C. glutamicum, to degrade hydrocarbons, to oxidize terpenoids, to serve as a target for drug development, or to serve as an identifying marker for C. glutamicum or related organisms, and which also includes heterologous nucleic acid sequences encoding a heterologous polypeptide or regulatory regions.

[0015] In another embodiment, the isolated nucleic acid molecule is at least 15 nucleotides in length and hybridizes under stringent conditions to a nucleic acid molecule comprising a nucleotide sequence of Appendix A. Preferably, the isolated nucleic acid molecule corresponds to a naturally-occurring nucleic acid molecule. More preferably, the isolated nucleic acid encodes a naturally-occurring C. glutamicum MCP protein, or a biologically active portion thereof.

[0016] Another aspect of the invention pertains to vectors, e.g., recombinant expression vectors, containing the nucleic acid molecules of the invention, and host cells into which such vectors have been introduced. In one embodiment, such a host cell is used to produce an MCP protein by culturing the host cell in a suitable medium. The MCP protein can then be isolated from the medium or the host cell.

[0017] Yet another aspect of the invention pertains to a genetically altered microorganism in which an MCP gene has been introduced or altered. In one embodiment, the genome of the microorganism has been altered by introduction of a nucleic acid molecule of the invention encoding wild-type or mutated MCP sequence as a transgene. In another embodiment, an endogenous MCP gene within the genome of the microorganism has been altered, e.g., functionally disrupted, by homologous recombination with an altered MCP gene. In another embodiment, an endogenous or introduced MCP gene in a microorganism has been altered by one or more point mutations, deletions, or inversions, but still encodes a functional MCP protein. In still another embodiment, one or more of the regulatory regions (e.g., a promoter, repressor, or inducer) of an MCP gene in a microorganism has been altered (e.g., by deletion, truncation, inversion, or point mutation) such that the expression of the MCP gene is modulated. In a preferred embodiment, the microorganism belongs to the genus Corynebacterium or Brevibacterium, with Corynebacterium glutamicum being particularly preferred. In a preferred embodiment, the microorganism is also utilized for the production of a desired compound, such as an amino acid, with lysine being particularly preferred.

[0018] In another aspect, the invention provides a method of identifying the presence or activity of Cornyebacterium diphtheriae in a subject. This method includes detection of one or more of the nucleic acid or amino acid sequences of the invention (e.g., the sequences set forth in Appendix A or Appendix B) in a subject, thereby detecting the presence or activity of Corynebacterium diphtheriae in the subject.

[0019] Still another aspect of the invention pertains to an isolated MCP protein or a portion, e.g., a biologically active portion, thereof. In a preferred embodiment, the isolated MCP protein or portion thereof is capable of modulating the production or efficiency of production of one or more fine chemicals from C. glutamicum, or of serving as an identifying marker for C. glutamicum or related organisms. In another preferred embodiment, the isolated MCP protein or portion thereof is sufficiently homologous to an amino acid sequence of Appendix B such that the protein or portion thereof maintains the ability to, for example, modulate the production or efficiency of production of one or more fine chemicals from C. glutamicum, or to serve as identifying markers for C. glutamicum or related organisms.

[0020] The invention also provides an isolated preparation of an MCP protein. In preferred embodiments, the MCP protein comprises an amino acid sequence of Appendix B. In another preferred embodiment, the invention pertains to an isolated full length protein which is substantially homologous to an entire amino acid sequence of Appendix B (encoded by an open reading frame set forth in Appendix A). In yet another embodiment, the protein is at least about 50%, preferably at least about 60%, and more preferably at least about 70%, 80%, or 90%, and most preferably at least about 95%, 96%, 97%, 98%, or 99% or more homologous to an entire amino acid sequence of Appendix B. In other embodiments, the isolated MCP protein comprises an amino acid sequence which is at least about 50% or more homologous to one of the amino acid sequences of Appendix B and is able to modulate the yield, production, and/or efficiency of production of one or more fine chemicals from C. glutamicum, to degrade hydrocarbons, to oxidize terpenoids, to serve as a target for drug development, or to serve as an identifying marker for C. glutamicum or related organisms.

[0021] Alternatively, the isolated MCP protein can comprise an amino acid sequence which is encoded by a nucleotide sequence which hybridizes, e.g., hybridizes under stringent conditions, or is at least about 50%, preferably at least about 60%, more preferably at least about 70%, 80%, or 90%, and even more preferably at least about 95%, 96%, 97%, 98,%, or 99% or more homologous, to a nucleotide sequence of Appendix B. It is also preferred that the preferred forms of MCP proteins also have one or more of the MCP bioactivities described herein.

[0022] The MCP polypeptide, or a biologically active portion thereof, can be operatively linked to a non-MCP polypeptide to form a fusion protein. In preferred embodiments, this fusion protein has an activity which differs from that of the MCP protein alone. In other preferred embodiments, this fusion protein is capable of modulating the yield, production and/or efficiency of production of one or more fine chemicals from C. glutamicum, or of serving as an identifying marker for C. glutamicum or related organisms. In particularly preferred embodiments, integration of this fusion protein into a host cell modulates production of a desired compound from the cell.

[0023] In another aspect, the invention provides methods for screening molecules which modulate the activity of an MCP protein, either by interacting with the protein itself or a substrate or binding partner of the MCP protein, or by modulating the transcription or translation of an MCP nucleic acid molecule of the invention.

[0024] Another aspect of the invention pertains to a method for producing a fine chemical. This method involves the culturing of a cell containing a vector directing the expression of an MCP nucleic acid molecule of the invention, such that a fine chemical is produced. In a preferred embodiment, this method further includes the step of obtaining a cell containing such a vector, in which a cell is transfected with a vector directing the expression of an MCP nucleic acid. In another preferred embodiment, this method further includes the step of recovering the fine chemical from the culture. In a particularly preferred embodiment, the cell is from the genus Corynebacterium or Brevibacterium, or is selected from those strains set forth in Table 3.

[0025] Another aspect of the invention pertains to methods for modulating production of a molecule from a microorganism. Such methods include contacting the cell with an agent which modulates MCP protein activity or MCP nucleic acid expression such that a cell associated activity is altered relative to this same activity in the absence of the agent. In a preferred embodiment, the cell is modulated for one or more C. glutamicum MCP protein activities, such that the yield, production, and/or efficiency of production of a desired fine chemical by this microorganism is improved. The agent which modulates MCP protein activity can be an agent which stimulates MCP protein activity or MCP nucleic acid expression. Examples of agents which stimulate MCP protein activity or MCP nucleic acid expression include small molecules, active MCP proteins, and nucleic acids encoding MCP proteins that have been introduced into the cell. Examples of agents which inhibit MCP activity or expression include small molecules and antisense MCP nucleic acid molecules.

[0026] Another aspect of the invention pertains to methods for modulating yields, production, and/or efficiency of production of a desired compound from a cell, involving the introduction of a wild-type or mutant MCP gene into a cell, either maintained on a separate plasmid or integrated into the genome of the host cell. If integrated into the genome, such integration can be random, or it can take place by homologous recombination such that the native gene is replaced by the introduced copy, causing the production of the desired compound from the cell to be modulated. In a preferred embodiment, said yields are increased. In another preferred embodiment, said chemical is a fine chemical. In a particularly preferred embodiment, said fine chemical is an amino acid. In especially preferred embodiments, said amino acid is L-lysine.

### DETAILED DESCRIPTION OF THE INVENTION

[0027] The present invention provides MCP nucleic acid and protein molecules. These MCP nucleic acid molecules may be utilized in the identification of Corynebacterium glutamicum or related organisms, in the mapping of the C. glutamicum genome (or a genome of a closely related organism), or in the identification of microorganisms which may be used to produce fine chemicals, e.g., by fermentation processes. The proteins encoded by these nucleic acids may be utilized in the direct or indirect modulation of the production or efficiency of production of one or more fine chemicals from C. glutamicum, as identifying markers for C. glutamicum or related organisms, in the oxidation of terpenoids or the degradation of hydrocarbons, or as targets for the development of therapeutic pharmaceutical compounds. Aspects of the invention are further explicated below.

I. Fine Chemicals

[0028] The term ‘fine chemical’ is art-recognized and includes molecules produced by an organism which have applications in various industries, such as, but not limited to, the pharmaceutical, agriculture, and cosmetics industries. Such compounds include organic acids, such as tartaric acid, itaconic acid, and diaminopimelic acid, both proteinogenic and non-proteinogenic amino acids, purine and pyrimidine bases, nucleosides, and nucleotides (as described e.g. in Kuninaka, A. (1996) Nucleotides and related compounds, p. 561-612, in Biotechnology vol. 6, Rehm et al., eds. VCH: Weinheim, and references contained therein), lipids, both saturated and unsaturated fatty acids (e.g., arachidonic acid), diols (e.g., propane diol, and butane diol), carbohydrates (e.g., hyaluronic acid and trehalose), aromatic compounds (e.g., aromatic amines, vanillin, and indigo), vitamins and cofactors (as described in Ullmann's Encyclopedia of Industrial Chemistry, vol. A27, “Vitamins”, p. 443-613 (1996) VCH: Weinheim and references therein; and Ong, A. S., Niki, E. & Packer, L. (1995) “Nutrition, Lipids, Health, and Disease” Proceedings of the UNESCO/Confederation of Scientific and Technological Associations in Malaysia, and the Society for Free Radical Research—Asia, held Sep. 1-3, 1994 at Penang, Malaysia, AOCS Press, (1995)), enzymes, polyketides (Cane et al. (1998) Science 282: 63-68), and all other chemicals described in Gutcho (1983) Chemicals by Fermentation, Noyes Data Corporation, ISBN: 0818805086 and references therein. The metabolism and uses of certain of these fine chemicals are further explicated below.

A. Amino Acid Metabolism and Uses

[0029] Amino acids comprise the basic structural units of all proteins, and as such are essential for normal cellular functioning in all organisms. The term “amino acid” is art-recognized. The proteinogenic amino acids, of which there are 20 species, serve as structural units for proteins, in which they are linked by peptide bonds, while the nonproteinogenic amino acids (hundreds of which are known) are not normally found in proteins (see Ulmann's Encyclopedia of Industrial Chemistry, vol. A2, p. 57-97 VCH: Weinheim (1985)). Amino acids may be in the D- or L-optical configuration, though L-amino acids are generally the only type found in naturally-occurring proteins. Biosynthetic and degradative pathways of each of the 20 proteinogenic amino acids have been well characterized in both prokaryotic and eukaryotic cells (see, for example, Stryer, L. Biochemistry, 3^{rd} edition, pages 578-590 (1988)). The ‘essential’ amino acids (histidine, isoleucine, leucine, lysine, methionine, phenylalanine, threonine, tryptophan, and valine), so named because they are generally a nutritional requirement due to the complexity of their biosyntheses, are readily converted by simple biosynthetic pathways to the remaining 11 ‘nonessential’ amino acids (alanine, arginine, asparagine, aspartate, cysteine, glutamate, glutamine, glycine, proline, serine, and tyrosine). Higher animals do retain the ability to synthesize some of these amino acids, but the essential amino acids must be supplied from the diet in order for normal protein synthesis to occur.

[0030] Aside from their function in protein biosynthesis, these amino acids are interesting chemicals in their own right, and many have been found to have various applications in the food, feed, chemical, cosmetics, agriculture, and pharmaceutical industries. Lysine is an important amino acid in the nutrition not only of humans, but also of monogastric animals such as poultry and swine. Glutamate is most commonly used as a flavor additive (mono-sodium glutamate, MSG) and is widely used throughout the food industry, as are aspartate, phenylalanine, glycine, and cysteine. Glycine, L-methionine and tryptophan are all utilized in the pharmaceutical industry. Glutamine, valine, leucine, isoleucine, histidine, arginine, proline, serine and alanine are of use in both the pharmaceutical and cosmetics industries. Threonine, tryptophan, and D/L-methionine are common feed additives. (Leuchtenberger, W. (1996) Amino aids—technical production and use, p. 466-502 in Rehm et al. (eds.) Biotechnology vol. 6, chapter 14a, VCH: Weinheim). Additionally, these amino acids have been found to be useful as precursors for the synthesis of synthetic amino acids and proteins, such as N-acetylcysteine, S-carboxymethyl-L-cysteine, (S)-5-hydroxytryptophan, and others described in Ulmann's Encyclopedia of Industrial Chemistry, vol. A2, p. 57-97, VCH: Weinheim, 1985.

[0031] The biosynthesis of these natural amino acids in organisms capable of producing them, such as bacteria, has been well characterized (for review of bacterial amino acid biosynthesis and regulation thereof, see Umbarger, H. E. (1978) Ann. Rev. Biochem. 47: 533-606). Glutamate is synthesized by the reductive amination of α-ketoglutarate, an intermediate in the citric acid cycle. Glutamine, proline, and arginine are each subsequently produced from glutamate. The biosynthesis of serine is a three-step process beginning with 3-phosphoglycerate (an intermediate in glycolysis), and resulting in this amino acid after oxidation, transamination, and hydrolysis steps. Both cysteine and glycine are produced from serine; the former by the condensation of homocysteine with serine, and the latter by the transferal of the side-chain β-carbon atom to tetrahydrofolate, in a reaction catalyzed by serine transhydroxymethylase. Phenylalanine, and tyrosine are synthesized from the glycolytic and pentose phosphate pathway precursors erythrose 4-phosphate and phosphoenolpyruvate in a 9-step biosynthetic pathway that differ only at the final two steps after synthesis of prephenate. Tryptophan is also produced from these two initial molecules, but its synthesis is an 11-step pathway. Tyrosine may also be synthesized from phenylalanine, in a reaction catalyzed by phenylalanine hydroxylase. Alanine, valine, and leucine are all biosynthetic products of pyruvate, the final product of glycolysis. Aspartate is formed from oxaloacetate, an intermediate of the citric acid cycle. Asparagine, methionine, threonine, and lysine are each produced by the conversion of aspartate. Isoleucine is formed from threonine. A complex 9-step pathway results in the production of histidine from 5-phosphoribosyl-1-pyrophosphate, an activated sugar.

[0032] Amino acids in excess of the protein synthesis needs of the cell cannot be stored, and are instead degraded to provide intermediates for the major metabolic pathways of the cell (for review see Stryer, L. Biochemistry 3^{rd} ed. Ch. 21 “Amino Acid Degradation and the Urea Cycle” p. 495-516 (1988)). Although the cell is able to convert unwanted amino acids into useful metabolic intermediates, amino acid production is costly in terms of energy, precursor molecules, and the enzymes necessary to synthesize them. Thus it is not surprising that amino acid biosynthesis is regulated by feedback inhibition, in which the presence of a particular amino acid serves to slow or entirely stop its own production (for overview of feedback mechanisms in amino acid biosynthetic pathways, see Stryer, L. Biochemistry, 3^{rd} ed. Ch. 24: “Biosynthesis of Amino Acids and Heme” p. 575-600 (1988)). Thus, the output of any particular amino acid is limited by the amount of that amino acid present in the cell.

B. Vitamin, Cofactor, and Nutraceutical Metabolism and Uses

[0033] Vitamins, cofactors, and nutraceuticals comprise another group of molecules which the higher animals have lost the ability to synthesize and so must ingest, although they are readily synthesized by other organisms such as bacteria. These molecules are either bioactive substances themselves, or are precursors of biologically active substances which may serve as electron carriers or intermediates in a variety of metabolic pathways. Aside from their nutritive value, these compounds also have significant industrial value as coloring agents, antioxidants, and catalysts or other processing aids. (For an overview of the structure, activity, and industrial applications of these compounds, see, for example, Ullman's Encyclopedia of Industrial Chemistry, “Vitamins” vol. A27, p. 443-613, VCH: Weinheim, 1996.) The term “vitamin” is art-recognized, and includes nutrients which are required by an organism for normal functioning, but which that organism cannot synthesize by itself. The group of vitamins may encompass cofactors and nutraceutical compounds. The language “cofactor” includes nonproteinaceous compounds required for a normal enzymatic activity to occur. Such compounds may be organic or inorganic; the cofactor molecules of the invention are preferably organic. The term “nutraceutical” includes dietary supplements having health benefits in plants and animals, particularly humans. Examples of such molecules are vitamins, antioxidants, and also certain lipids (e.g., polyunsaturated fatty acids).

[0034] The biosynthesis of these molecules in organisms capable of producing them, such as bacteria, has been largely characterized (Ullman's Encyclopedia of Industrial Chemistry, “Vitamins” vol. A27, p. 443-613, VCH: Weinheim, 1996; Michal, G. (1999) Biochemical Pathways: An Atlas of Biochemistry and Molecular Biology, John Wiley & Sons; Ong, A. S., Niki, E. & Packer, L. (1995) “Nutrition, Lipids, Health, and Disease” Proceedings of the UNESCO/Confederation of Scientific and Technological Associations in Malaysia, and the Society for Free Radical Research—Asia, held Sep. 1-3, 1994 at Penang, Malaysia, AOCS Press: Champaign, IL X, 374 S).

[0035] Thiamin (vitamin B₁) is produced by the chemical coupling of pyrimidine and thiazole moieties. Riboflavin (vitamin B₂) is synthesized from guanosine-5′-triphosphate (GTP) and ribose-5′-phosphate. Riboflavin, in turn, is utilized for the synthesis of flavin mononucleotide (FMN) and flavin adenine dinucleotide (FAD). The family of compounds collectively termed ‘vitamin B₆’ (e.g., pyridoxine, pyridoxamine, pyridoxa-5′-phosphate, and the commercially used pyridoxin hydrochloride) are all derivatives of the common structural unit, 5-hydroxy-6-methylpyridine. Pantothenate (pantothenic acid, (R)-(+)-N-(2,4-dihydroxy-3,3-dimethyl-1-oxobutyl)-β-alanine) can be produced either by chemical synthesis or by fermentation. The final steps in pantothenate biosynthesis consist of the ATP-driven condensation of β-alanine and pantoic acid. The enzymes responsible for the biosynthesis steps for the conversion to pantoic acid, to β-alanine and for the condensation to panthotenic acid are known. The metabolically active form of pantothenate is Coenzyme A, for which the biosynthesis proceeds in 5 enzymatic steps. Pantothenate, pyridoxal-5′-phosphate, cysteine and ATP are the precursors of Coenzyme A. These enzymes not only catalyze the formation of panthothante, but also the production of (R)-pantoic acid, (R)-pantolacton, (R)-panthenol (provitamin B₅), pantetheine (and its derivatives) and coenzyme A.

[0036] Biotin biosynthesis from the precursor molecule pimeloyl-CoA in microorganisms has been studied in detail and several of the genes involved have been identified. Many of the corresponding proteins have been found to also be involved in Fe-cluster synthesis and are members of the nifS class of proteins. Lipoic acid is derived from octanoic acid, and serves as a coenzyme in energy metabolism, where it becomes part of the pyruvate dehydrogenase complex and the α-ketoglutarate dehydrogenase complex. The folates are a group of substances which are all derivatives of folic acid, which is turn is derived from L-glutamic acid, p-amino-benzoic acid and 6-methylpterin. The biosynthesis of folic acid and its derivatives, starting from the metabolism intermediates guanosine-5′-triphosphate (GTP), L-glutamic acid and p-amino-benzoic acid has been studied in detail in certain microorganisms.

[0037] Corrinoids (such as the cobalamines and particularly vitamin B₁₂) and porphyrines belong to a group of chemicals characterized by a tetrapyrole ring system. The biosynthesis of vitamin B₁₂ is sufficiently complex that it has not yet been completely characterized, but many of the enzymes and substrates involved are now known. Nicotinic acid (nicotinate), and nicotinamide are pyridine derivatives which are also termed ‘niacin’. Niacin is the precursor of the important coenzymes NAD (nicotinamide adenine dinucleotide) and NADP (nicotinamide adenine dinucleotide phosphate) and their reduced forms.

[0038] The large-scale production of these compounds has largely relied on cell-free chemical syntheses, though some of these chemicals have also been produced by large-scale culture of microorganisms, such as riboflavin, Vitamin B₆, pantothenate, and biotin. Only Vitamin B₁₂ is produced solely by fermentation, due to the complexity of its synthesis. In vitro methodologies require significant inputs of materials and time, often at great cost.

C. Purine, Pyrimidine, Nucleoside and Nucleotide Metabolism and Uses

[0039] Purine and pyrimidine metabolism genes and their corresponding proteins are important targets for the therapy of tumor diseases and viral infections. The language “purine” or “pyrimidine” includes the nitrogenous bases which are constituents of nucleic acids, co-enzymes, and nucleotides. The term “nucleotide” includes the basic structural units of nucleic acid molecules, which are comprised of a nitrogenous base, a pentose sugar (in the case of RNA, the sugar is ribose; in the case of DNA, the sugar is D-deoxyribose), and phosphoric acid. The language “nucleoside” includes molecules which serve as precursors to nucleotides, but which are lacking the phosphoric acid moiety that nucleotides possess. By inhibiting the biosynthesis of these molecules, or their mobilization to form nucleic acid molecules, it is possible to inhibit RNA and DNA synthesis; by inhibiting this activity in a fashion targeted to cancerous cells, the ability of tumor cells to divide and replicate may be inhibited. Additionally, there are nucleotides which may serve as energy stores (e.g., ADP, ATP) or as coenzymes (i.e., FAD and NAD).

[0040] Several publications have described the use of these chemicals for these medical indications, by influencing purine and/or pyrimidine metabolism (e.g. Christopherson, R. I. and Lyons, S. D. (1990) “Potent inhibitors of de novo pyrimidine and purine biosynthesis as chemotherapeutic agents.” Med. Res. Reviews 10: 505-548). Studies of enzymes involved in purine and pyrimidine metabolism have been focused on the development of new drugs which can be used, for example, as immunosuppressants or anti-proliferants (Smith, J. L., (1995) “Enzymes in nucleotide synthesis.” Curr. Opin. Struct. Biol. 5: 752-757; (1995) Biochem Soc. Transact. 23: 877-902). However, purine and pyrimidine bases, nucleosides and nucleotides have other utilities: as intermediates in the biosynthesis of several fine chemicals (e.g., thiamine, S-adenosyl-methionine, folates, or riboflavin), as energy carriers for the cell (e.g., ATP or GTP), and for chemicals themselves, commonly used as flavor enhancers (e.g., IMP or GMP) or for several medicinal applications (see, for example, Kuninaka, A. (1996) Nucleotides and Related Compounds in Biotechnology vol. 6, Rehm et al., eds. VCH: Weinheim, p. 561-612). Also, enzymes involved in purine, pyrimidine, nucleoside, or nucleotide metabolism are increasingly serving as targets against which chemicals for crop protection, including fungicides, herbicides and insecticides, are developed.

[0041] The metabolism of these compounds in bacteria has been characterized (for reviews see, for example, Zalkin, H. and Dixon, J. E. (1992) “de novo purine nucleotide biosynthesis”, in: Progress in Nucleic Acid Research and Molecular Biology, vol. 42, Academic Press: p. 259-287; and Michal, G. (1999) “Nucleotides and Nucleosides”, Chapter 8 in: Biochemical Pathways: An Atlas of Biochemistry and Molecular Biology, Wiley: New York). Purine metabolism has been the subject of intensive research, and is essential to the normal functioning of the cell. Impaired purine metabolism in higher animals can cause severe disease, such as gout. Purine nucleotides are synthesized from ribose-5-phosphate, in a series of steps through the intermediate compound inosine-5′-phosphate (IMP), resulting in the production of guanosine-5′-monophosphate (GMP) or adenosine-5′-monophosphate (AMP), from which the triphosphate forms utilized as nucleotides are readily formed. These compounds are also utilized as energy stores, so their degradation provides energy for many different biochemical processes in the cell. Pyrimidine biosynthesis proceeds by the formation of uridine-5′-monophosphate (UMP) from ribose-5-phosphate. UMP, in turn, is converted to cytidine-5′-triphosphate (CTP). The deoxy-forms of all of these nucleotides are produced in a one step reduction reaction from the diphosphate ribose form of the nucleotide to the diphosphate deoxyribose form of the nucleotide. Upon phosphorylation, these molecules are able to participate in DNA synthesis.

D. Trehalose Metabolism and Uses

[0042] Trehalose consists of two glucose molecules, bound in α, α-1,1 linkage. It is commonly used in the food industry as a sweetener, an additive for dried or frozen foods, and in beverages. However, it also has applications in the pharmaceutical, cosmetics and biotechnology industries (see, for example, Nishimoto et al., (1998) U.S. Pat. No. 5,759,610; Singer, M. A. and Lindquist, S. (1998) Trends Biotech. 16: 460-467; Paiva, C. L. A. and Panek, A. D. (1996) Biotech. Ann. Rev. 2: 293-314; and Shiosaka, M. (1997) J. Japan 172: 97-102). Trehalose is produced by enzymes from many microorganisms and is naturally released into the surrounding medium, from which it can be collected using methods known in the art.

II. Elements and Methods of the Invention

[0043] The present invention is based, at least in part, on the discovery of novel molecules, referred to herein as MCP nucleic acid molecules. These MCP nucleic acid molecules are useful not only for the identification of C. glutamicum or related bacterial species, but also as markers for the mapping of the C. glutamicum genome and in the identification of bacteria useful for the production of fine chemicals by, e.g., fermentative processes. The present invention is also based, at least in part, on the MCP protein molecules encoded by these MCP nucleic acid molecules. These MCP proteins are capable of modulating the yield, production, and/or efficiency of production of one or more fine chemicals from C. glutamicum, of serving as identifying markers for C. glutamicum or related organisms, of degrading hydrocarbons, and of serving as targets for the development of therapeutic pharmaceutical compounds. In one embodiment, the MCP molecules of the invention directly or indirectly participate in one or more fine chemical metabolic pathways in C. glutamicum. In a preferred embodiment, the activity of the MCP molecules of the invention to indirectly or directly participate in such metabolic pathways has an impact on the production of a desired fine chemical by this microorganism. In a particularly preferred embodiment, the MCP molecules of the invention are modulated in activity, such that the C. glutamicum metabolic pathways in which the MCP proteins of the invention participate are modulated in efficiency or output, which either directly or indirectly modulates the production or efficiency of production of a desired fine chemical by C. glutamicum.

[0044] The language, “MCP protein” or “MCP polypeptide” includes proteins which are able to modulate the yield, production, and/or efficiency of production of one or more fine chemicals from C. glutamicum, to degrade hydrocarbons, to oxidize terpenoids, to serve as a target protein for drug screening or design, or to serve as identifying markers for C. glutamicum or related organisms. Examples of MCP proteins include those encoded by the MCP genes set forth in Table 1 and Appendix A. The terms “MCP gene” or “MCP nucleic acid sequence” include nucleic acid sequences encoding an MCP protein, which consist of a coding region and also corresponding untranslated 5′ and 3′ sequence regions. Examples of MCP genes include those set forth in Table 1. The terms “production” or “productivity” are art-recognized and include the concentration of the fermentation product (for example, the desired fine chemical) formed within a given time and a given fermentation volume (e.g., kg product per hour per liter). The term “efficiency of production” includes the time required for a particular level of production to be achieved (for example, how long it takes for the cell to attain a particular rate of output of a fine chemical). The term “yield” or “product/carbon yield” is art-recognized and includes the efficiency of the conversion of the carbon source into the product (i.e., fine chemical). This is generally written as, for example, kg product per kg carbon source. By increasing the yield or production of the compound, the quantity of recovered molecules, or of useful recovered molecules of that compound in a given amount of culture over a given amount of time is increased. The terms “biosynthesis” or a “biosynthetic pathway” are art-recognized and include the synthesis of a compound, preferably an organic compound, by a cell from intermediate compounds in what may be a multistep and highly regulated process. The terms “degradation” or a “degradation pathway” are art-recognized and include the breakdown of a compound, preferably an organic compound, by a cell to degradation products (generally speaking, smaller or less complex molecules) in what may be a multistep and highly regulated process. The language “metabolism” is art-recognized and includes the totality of the biochemical reactions that take place in an organism. The metabolism of a particular compound, then, (e.g., the metabolism of an amino acid such as glycine) comprises the overall biosynthetic, modification, and degradation pathways in the cell related to this compound.

[0045] In another embodiment, the MCP molecules of the invention are capable of modulating the production of a desired molecule, such as a fine chemical, in a microorganism such as C. glutamicum, either directly or indirectly. Using recombinant genetic techniques, one or more of the MCP proteins of the invention may be manipulated such that its function is modulated. Such modulation of function may result in the modulation of the yield, production, and/or efficiency of production of one or more fine chemicals from C. glutamicum.

[0046] For example, by modifying the activity of a protein involved in the biosynthesis or degradation of a fine chemical (i.e., through mutagenesis of the corresponding gene), one may directly modulate the ability of the cell to synthesize or to degrade this compound, thereby modulating the yield and/or efficiency of production of the fine chemical. Similarly, by modulating the activity of a protein which regulates a fine chemical metabolic pathway, one may directly influence whether the production of the desired compound is up- or down-regulated, either of which will modulate the yield or efficiency of production of the fine chemical from the cell.

[0047] Indirect modulation of fine chemical production may also result by modifying the activity of a protein of the invention (i.e., by mutagenesis of the corresponding gene) such that the overall ability of the cell to grow and divide or to remain viable and productive is increased. The production of fine chemicals from C. glutamicum is generally accomplished by the large-scale fermentative culture of these microorganisms, conditions which are frequently suboptimal for growth and cell division. By engineering a protein of the invention (e.g., a stress response protein, a cell wall protein, or proteins involved in the metabolism of compounds necessary for cell growth and division to occur, such as nucleotides and amino acids) such that it is better able to survive, grow, and multiply in such conditions, it may be possible to increase the number and productivity of such engineered C. glutamicum cells in large-scale culture, which in turn should result in increased yields and/or efficiency of production of one or more desired fine chemicals. Further, the metabolic pathways of any cell are necessarily interrelated and coregulated. By altering the activity or regulation of any one metabolic pathway in C. glutamicum (i.e., by altering the activity of one of the proteins of the invention which participates in such a pathway), it is possible to concomitantly alter the activity or regulation of other metabolic pathways in this microorganism, which may be directly involved in the synthesis or degradation of a fine chemical.

[0048] The isolated nucleic acid sequences of the invention are contained within the genome of a Corynebacterium glutamicum strain available through the American Type Culture Collection, given designation ATCC 13032. The nucleotide sequences of the isolated C. glutamicum MCP nucleic acid molecules and the predicted amino acid sequences of the C. glutamicum MCP proteins are shown in Appendices A and B, respectively. Computational analyses were performed which classified and/or identified many of these nucleotide sequences as sequences having homology to E. coli or Bacillus subtilis genes.

[0049] The present invention also pertains to proteins which have an amino acid sequence which is substantially homologous to an amino acid sequence of Appendix B. As used herein, a protein which has an amino acid sequence which is substantially homologous to a selected amino acid sequence is least about 50% homologous to the selected amino acid sequence, e.g., the entire selected amino acid sequence. A protein which has an amino acid sequence which is substantially homologous to a selected amino acid sequence can also be least about 50-60%, preferably at least about 60-70%, and more preferably at least about 70-80%, 80-90%, or 90-95%, and most preferably at least about 96%, 97%, 98%, 99% or more homologous to the selected amino acid sequence.

[0050] The MCP protein or a biologically active portion or fragment thereof of the invention is able to modulate the yield, production, and/or efficiency of production of one or more fine chemicals from C. glutamicum, to degrade hydrocarbons, to oxidize terpenoids, to serve as a target for drug development, or to serve as an identifying marker for C. glutamicum or related organisms.

[0051] Various aspects of the invention are described in further detail in the following subsections:

A. Isolated Nucleic Acid Molecules

[0052] One aspect of the invention pertains to isolated nucleic acid molecules that encode MCP polypeptides or biologically active portions thereof, as well as nucleic acid fragments sufficient for use as hybridization probes or primers for the identification or amplification of MCP-encoding nucleic acid (e.g., MCP DNA). These nucleic acid molecules may be used to identify C. glutamicum or related organisms, to map the genome of C. glutamicum or closely related bacteria, or to identify microorganisms useful for the production of fine chemicals, e.g., by fermentative processes. As used herein, the term “nucleic acid molecule” is intended to include DNA molecules (e.g., cDNA or genomic DNA) and RNA molecules (e.g., mRNA) and analogs of the DNA or RNA generated using nucleotide analogs. This term also encompasses untranslated sequence located at both the 3′ and 5′ ends of the coding region of the gene: at least about 100 nucleotides of sequence upstream from the 5′ end of the coding region and at least about 20 nucleotides of sequence downstream from the 3′ end of the coding region of the gene. The nucleic acid molecule can be single-stranded or double-stranded, but preferably is double-stranded DNA. An “isolated” nucleic acid molecule is one which is separated from other nucleic acid molecules which are present in the natural source of the nucleic acid. Preferably, an “isolated” nucleic acid is free of sequences which naturally flank the nucleic acid (i.e., sequences located at the 5′ and 3′ ends of the nucleic acid) in the genomic DNA of the organism from which the nucleic acid is derived. For example, in various embodiments, the isolated MCP nucleic acid molecule can contain less than about 5 kb, 4 kb, 3 kb, 2 kb, 1 kb, 0.5 kb or 0.1 kb of nucleotide sequences which naturally flank the nucleic acid molecule in genomic DNA of the cell from which the nucleic acid is derived (e.g, a C. glutamicum cell). Moreover, an “isolated” nucleic acid molecule, such as a DNA molecule, can be substantially free of other cellular material, or culture medium when produced by recombinant techniques, or chemical precursors or other chemicals when chemically synthesized.

[0053] A nucleic acid molecule of the present invention, e.g., a nucleic acid molecule having a nucleotide sequence of Appendix A, or a portion thereof, can be isolated using standard molecular biology techniques and the sequence information provided herein. For example, a C. glutamicum MCP DNA can be isolated from a C. glutamicum library using all or portion of one of the sequences of Appendix A as a hybridization probe and standard hybridization techniques (e.g., as described in Sambrook, J., Fritsh, E. F., and Maniatis, T. Molecular Cloning: A Laboratory Manual. 2nd, ed., Cold Spring Harbor Laboratory, Cold Spring Harbor Laboratory Press, Cold Spring Harbor, N.Y., 1989). Moreover, a nucleic acid molecule encompassing all or a portion of one of the sequences of Appendix A can be isolated by the polymerase chain reaction using oligonucleotide primers designed based upon this sequence (e.g., a nucleic acid molecule encompassing all or a portion of one of the sequences of Appendix A can be isolated by the polymerase chain reaction using oligonucleotide primers designed based upon this same sequence of Appendix A). For example, mRNA can be isolated from normal endothelial cells (e.g., by the guanidinium-thiocyanate extraction procedure of Chirgwin et al. (1979) Biochemistry 18: 5294-5299) and DNA can be prepared using reverse transcriptase (e.g., Moloney MLV reverse transcriptase, available from Gibco/BRL, Bethesda, Md.; or AMV reverse transcriptase, available from Seikagaku America, Inc., St. Petersburg, Fla.) and random polynucleotide primers or oligonucleotide primers based upon one of the nucleotide sequences shown in Appendix A. Synthetic oligonucleotide primers for polymerase chain reaction amplification can be designed based upon one of the nucleotide sequences shown in Appendix A. A nucleic acid of the invention can be amplified using cDNA or, alternatively, genomic DNA, as a template and appropriate oligonucleotide primers according to standard PCR amplification techniques. The nucleic acid so amplified can be cloned into an appropriate vector and characterized by DNA sequence analysis. Furthermore, oligonucleotides corresponding to an MCP nucleotide sequence can be prepared by standard synthetic techniques, e.g., using an automated DNA synthesizer.

[0054] In a preferred embodiment, an isolated nucleic acid molecule of the invention comprises one of the nucleotide sequences shown in Appendix A. The sequences of Appendix A correspond to the Corynebacterium glutamicum MCP DNAs of the invention. This cDNA comprises sequences encoding MCP proteins (i.e., the “coding region”, indicated in each sequence in Appendix A), as well as 5′ untranslated sequences and 3′ untranslated sequences, also indicated in Appendix A. Alternatively, the nucleic acid molecule can comprise only the coding region of any of the sequences in Appendix A.

[0055] For the purposes of this application, it will be understood that each of the sequences set forth in Appendix A has an identifying RXA or RXN number having the designation “RXA” or “RXN” followed by 5 digits (i.e., RXA00003 or RXN00022). Each of these sequences comprises up to three parts: a 5′ upstream region, a coding region, and a downstream region. Each of these three regions is identified by the same RXA or RXN designation to eliminate confusion. The recitation “one of the sequences in Appendix A”, then, refers to any of the sequences in Appendix A, which may be distinguished by their differing RXA or RXN designations. The coding region of each of these sequences is translated into a corresponding amino acid sequence, which is set forth in Appendix B. The sequences of Appendix B are identified by the same RXA or RXN designations as Appendix A, such that they can be readily correlated. For example, the amino acid sequence in Appendix B designated RXA00003 is a translation of the coding region of the nucleotide sequence of nucleic acid molecule RXA00003 in Appendix A, and the amino acid sequence in Appendix B designated RXN00022 is a translation of the coding region of the nucleotide sequence of nucleic acid molecule RXN00022 in Appendix A. Each of the RXA and RXN nucleotide and amino acid sequences of the invention has also been assigned a SEQ ID NO, as indicated in Table 1.

[0056] Several of the genes of the invention are “F-designated genes”. An F-designated gene includes those genes set forth in Table 1 which have an ‘F’ in front of the RXA designation. For example, SEQ ID NO:3, designated, as indicated on Table 1, as “F RXA01638”, is an F-designated gene, as are SEQ ID NOs: 5, 9, and 11 (designated on Table 1 as “F RXA01639”, “F RXA01590”, and “F RXA01542”, respectively).

[0057] In one embodiment, the nucleic acid molecules of the present invention are not intended to include those compiled in Table 2.

[0058] In another preferred embodiment, an isolated nucleic acid molecule of the invention comprises a nucleic acid molecule which is a complement of one of the nucleotide sequences shown in Appendix A, or a portion thereof. A nucleic acid molecule which is complementary to one of the nucleotide sequences shown in Appendix A is one which is sufficiently complementary to one of the nucleotide sequences shown in Appendix A such that it can hybridize to one of the nucleotide sequences shown in Appendix A, thereby forming a stable duplex.

[0059] In still another preferred embodiment, an isolated nucleic acid molecule of the invention comprises a nucleotide sequence which is at least about 50%, 51%, 52%, 53%, 54%, 55%, 56%, 57%, 58%, 59%, or 60%, preferably at least about 61%, 62%, 63%, 64%, 65%, 66%, 67%, 68%, 69%, or 70%, more preferably at least about 71%, 72%, 73%, 74%, 75%, 76%, 77%, 78%, 79%, or 80%, 81%, 82%, 83%, 84%, 85%, 86%, 87%, 88%, 89%, or 90%, or 91%, 92%, 93%, 94%, and even more preferably at least about 95%, 96%, 97%, 98%, 99% or more homologous to a nucleotide sequence shown in Appendix A, or a portion thereof. Ranges and identity values intermediate to the above-recited ranges, (e.g., 70-90% identical or 80-95% identical) are also intended to be encompassed by the present invention. For example, ranges of identity values using a combination of any of the above values recited as upper and/or lower limits are intended to be included. In an additional preferred embodiment, an isolated nucleic acid molecule of the invention comprises a nucleotide sequence which hybridizes, e.g., hybridizes under stringent conditions, to one of the nucleotide sequences shown in Appendix A, or a portion thereof.

[0060] Moreover, the nucleic acid molecule of the invention can comprise only a portion of the coding region of one of the sequences in Appendix A, for example a fragment which can be used as a probe or primer or a fragment encoding a biologically active portion of an MCP protein. The nucleotide sequences determined from the cloning of the MCP genes from C. glutamicum allows for the generation of probes and primers designed for use in identifying and/or cloning MCP homologues in other cell types and organisms, as well as MCP homologues from other Corynebacteria or related species. The probe/primer typically comprises substantially purified oligonucleotide. The oligonucleotide typically comprises a region of nucleotide sequence that hybridizes under stringent conditions to at least about 12, preferably about 25, more preferably about 40, 50 or 75 consecutive nucleotides of a sense strand of one of the sequences set forth in Appendix A, an anti-sense sequence of one of the sequences set forth in Appendix A, or naturally occurring mutants thereof. Primers based on a nucleotide sequence of Appendix A can be used in PCR reactions to clone MCP homologues. Probes based on the MCP nucleotide sequences can be used to detect transcripts or genomic sequences encoding the same or homologous proteins. In preferred embodiments, the probe further comprises a label group attached thereto, e.g. the label group can be a radioisotope, a fluorescent compound, an enzyme, or an enzyme co-factor. Such probes can be used as a part of a diagnostic test kit for identifying cells which misexpress an MCP protein, such as by measuring a level of an MCP-encoding nucleic acid in a sample of cells, e.g., detecting MCP mRNA levels or determining whether a genomic MCP gene has been mutated or deleted.

[0061] In one embodiment, the nucleic acid molecule of the invention encodes a protein or portion thereof which includes an amino acid sequence which is sufficiently homologous to an amino acid sequence of Appendix B such that the protein or portion thereof maintains the ability to modulate the yield, production, and/or efficiency of production of one or more fine chemicals from C. glutamicum, to degrade hydrocarbons, to oxidize terpenoids, to serve as a target for drug development, or to serve as an identifying marker for C. glutamicum or related organisms. As used herein, the language “sufficiently homologous” refers to proteins or portions thereof which have amino acid sequences which include a minimum number of identical or equivalent (e.g., an amino acid residue which has a similar side chain as an amino acid residue in one of the sequences of Appendix B) amino acid residues to an amino acid sequence of Appendix B such that the protein or portion thereof is able to modulate the yield, production, and/or efficiency of production of one or more fine chemicals from C. glutamicum, to degrade hydrocarbons, to oxidize terpenoids, to serve as a target for drug development, or to serve as an identifying marker for C. glutamicum or related organisms. Examples of such activities are also described herein. Thus, “the function of an MCP protein” contributes to the overall regulation of one or more fine chemical metabolic pathways, or to the degradation of a hydrocarbon, or to the oxidation of a terpenoid.

[0062] In another embodiment, the protein is at least about 50-60%, preferably at least about 60-70%, and more preferably at least about 70-80%, 80-90%, 90-95%, and most preferably at least about 96%, 97%, 98%, 99% or more homologous to an entire amino acid sequence of Appendix B.

[0063] Portions of proteins encoded by the MCP nucleic acid molecules of the invention are preferably biologically active portions of one of the MCP proteins. As used herein, the term “biologically active portion of an MCP protein” is intended to include a portion, e.g., a domain/motif, of an MCP protein that modulates the yield, production, and/or efficiency of production of one or more fine chemicals from C. glutamicum, that degrades hydrocarbons, that oxidizes terpenoids, that may serve as a target for drug development, or that may serve as an identifying marker for C. glutamicum or related organisms. To determine whether an MCP protein or a biologically active portion thereof can modulate the yield, production, and/or efficiency of production of one or more fine chemicals from C. glutamicum, can degrade hydrocarbons, or can oxidize terpenoids, an assay of activity may be performed. Such assay methods are well known to those of ordinary skill in the art, as detailed in Example 8 of the Exemplification.

[0064] Additional nucleic acid fragments encoding biologically active portions of an MCP protein can be prepared by isolating a portion of one of the sequences in Appendix B, expressing the encoded portion of the MCP protein or peptide (e.g., by recombinant expression in vitro) and assessing the activity of the encoded portion of the MCP protein or peptide.

[0065] The invention further encompasses nucleic acid molecules that differ from one of the nucleotide sequences shown in Appendix A (and portions thereof) due to degeneracy of the genetic code and thus encode the same MCP protein as that encoded by the nucleotide sequences shown in Appendix A. In another embodiment, an isolated nucleic acid molecule of the invention has a nucleotide sequence encoding a protein having an amino acid sequence shown in Appendix B. In a still further embodiment, the nucleic acid molecule of the invention encodes a full length C. glutamicum protein which is substantially homologous to an amino acid sequence of Appendix B (encoded by an open reading frame shown in Appendix A).

[0066] It will be understood by one of ordinary skill in the art that in one embodiment the sequences of the invention are not meant to include the sequences of the prior art, such as those Genbank sequences set forth in Tables 2 or 4 which were available prior to the present invention. In one embodiment, the invention includes nucleotide and amino acid sequences having a percent identity to a nucleotide or amino acid sequence of the invention which is greater than that of a sequence of the prior art (e.g., a Genbank sequence (or the protein encoded by such a sequence) set forth in Tables 2 or 4). For example, the invention includes a nucleotide sequence which is greater than and/or at least 39% identical to the nucleotide sequence designated RXA00008 (SEQ ID NO: 1549), a nucleotide sequence which is greater than and/or at least 42% identical to the nucleotide sequence designated RXA00059 (SEQ ID NO:1571), and a nucleotide sequence which is greater than and/or at least 39% identical to the nucleotide sequence designated RXA00096 (SEQ ID NO:93). One of ordinary skill in the art would be able to calculate the lower threshold of percent identity for any given sequence of the invention by examining the GAP-calculated percent identity scores set forth in Table 4 for each of the three top hits for the given sequence, and by subtracting the highest GAP-calculated percent identity from 100 percent. One of ordinary skill in the art will also appreciate that nucleic acid and amino acid sequences having percent identities greater than the lower threshold so calculated (e.g., at least 50%, 51%, 52%, 53%, 54%, 55%, 56%, 57%, 58%, 59%, or 60%, preferably at least about 61%, 62%, 63%, 64%, 65%, 66%, 67%, 68%, 69%, or 70%, more preferably at least about 71%, 72%, 73%, 74%, 75%, 76%, 77%, 78%, 79%, or 80%, 81%, 82%, 83%, 84%, 85%, 86%, 87%, 88%, 89%, or 90%, or 91%, 92%, 93%, 94%, and even more preferably at least about 95%, 96%, 97%, 98%, 99% or more identical) are also encompassed by the invention.

[0067] In addition to the C. glutamicum MCP nucleotide sequences shown in Appendix A, it will be appreciated by those of ordinary skill in the art that DNA sequence polymorphisms that lead to changes in the amino acid sequences of MCP proteins may exist within a population (e.g., the C. glutamicum population). Such genetic polymorphism in the MCP gene may exist among individuals within a population due to natural variation. As used herein, the terms “gene” and “recombinant gene” refer to nucleic acid molecules comprising an open reading frame encoding an MCP protein, preferably a C. glutamicum MCP protein. Such natural variations can typically result in 1-5% variance in the nucleotide sequence of the MCP gene. Any and all such nucleotide variations and resulting amino acid polymorphisms in MCP that are the result of natural variation and that do not alter the functional activity of MCP proteins are intended to be within the scope of the invention.

[0068] Nucleic acid molecules corresponding to natural variants and non-C. glutamicum homologues of the C. glutamicum MCP DNA of the invention can be isolated based on their homology to the C. glutamicum MCP nucleic acid disclosed herein using the C. glutamicum DNA, or a portion thereof, as a hybridization probe according to standard hybridization techniques under stringent hybridization conditions. Accordingly, in another embodiment, an isolated nucleic acid molecule of the invention is at least 15 nucleotides in length and hybridizes under stringent conditions to the nucleic acid molecule comprising a nucleotide sequence of Appendix A. In other embodiments, the nucleic acid is at least 30, 50, 100, 250 or more nucleotides in length. As used herein, the term “hybridizes under stringent conditions” is intended to describe conditions for hybridization and washing under which nucleotide sequences at least 60% homologous to each other typically remain hybridized to each other. Preferably, the conditions are such that sequences at least about 65%, more preferably at least about 70%, and even more preferably at least about 75% or more homologous to each other typically remain hybridized to each other. Such stringent conditions are known to those of ordinary skill in the art and can be found in Current Protocols in Molecular Biology, John Wiley & Sons, N.Y. (1989), 6.3.1-6.3.6. A preferred, non-limiting example of stringent hybridization conditions are hybridization in 6× sodium chloride/sodium citrate (SSC) at about 45° C., followed by one or more washes in 0.2×SSC, 0.1% SDS at 50-65° C. Preferably, an isolated nucleic acid molecule of the invention that hybridizes under stringent conditions to a sequence of Appendix A corresponds to a naturally-occurring nucleic acid molecule. As used herein, a “naturally-occurring” nucleic acid molecule refers to an RNA or DNA molecule having a nucleotide sequence that occurs in nature (e.g., encodes a natural protein). In one embodiment, the nucleic acid encodes a natural C. glutamicum MCP protein.

[0069] In addition to naturally-occurring variants of the MCP sequence that may exist in the population, one of ordinary skill in the art will further appreciate that changes can be introduced by mutation into a nucleotide sequence of Appendix A, thereby leading to changes in the amino acid sequence of the encoded MCP protein, without altering the functional ability of the MCP protein. For example, nucleotide substitutions leading to amino acid substitutions at “non-essential” amino acid residues can be made in a sequence of Appendix A. A “non-essential” amino acid residue is a residue that can be altered from the wild-type sequence of one of the MCP proteins (Appendix B) without altering the activity of said MCP protein, whereas an “essential” amino acid residue is required for MCP protein activity. Other amino acid residues, however, (e.g., those that are not conserved or only semi-conserved in the domain having MCP activity) may not be essential for activity and thus are likely to be amenable to alteration without altering MCP activity.

[0070] Accordingly, another aspect of the invention pertains to nucleic acid molecules encoding MCP proteins that contain changes in amino acid residues that are not essential for MCP activity. Such MCP proteins differ in amino acid sequence from a sequence contained in Appendix B yet retain at least one of the MCP activities described herein. In one embodiment, the isolated nucleic acid molecule comprises a nucleotide sequence encoding a protein, wherein the protein comprises an amino acid sequence at least about 50% homologous to an amino acid sequence of Appendix B and is able to modulate the yield, production, and/or efficiency of production of one or more fine chemicals from C. glutamicum, to degrade hydrocarbons, to oxidize terpenoids, to serve as a target for drug development, or to serve as an identifying marker for C. glutamicum or related organisms. Preferably, the protein encoded by the nucleic acid molecule is at least about 50-60% homologous to one of the sequences in Appendix B, more preferably at least about 60-70% homologous to one of the sequences in Appendix B, even more preferably at least about 70-80%, 80-90%, 90-95% homologous to one of the sequences in Appendix B, and most preferably at least about 96%, 97%, 98%, or 99% homologous to one of the sequences in Appendix B.

[0071] To determine the percent homology of two amino acid sequences (e.g., one of the sequences of Appendix B and a mutant form thereof) or of two nucleic acids, the sequences are aligned for optimal comparison purposes (e.g., gaps can be introduced in the sequence of one protein or nucleic acid for optimal alignment with the other protein or nucleic acid). The amino acid residues or nucleotides at corresponding amino acid positions or nucleotide positions are then compared. When a position in one sequence (e.g., one of the sequences of Appendix B) is occupied by the same amino acid residue or nucleotide as the corresponding position in the other sequence (e.g., a mutant form of the sequence selected from Appendix B), then the molecules are homologous at that position (i.e., as used herein amino acid or nucleic acid “homology” is equivalent to amino acid or nucleic acid “identity”). The percent homology between the two sequences is a function of the number of identical positions shared by the sequences (i.e., % homology=# of identical positions/total # of positions×100).

[0072] An isolated nucleic acid molecule encoding an MCP protein homologous to a protein sequence of Appendix B can be created by introducing one or more nucleotide substitutions, additions or deletions into a nucleotide sequence of Appendix A such that one or more amino acid substitutions, additions or deletions are introduced into the encoded protein. Mutations can be introduced into one of the sequences of Appendix A by standard techniques, such as site-directed mutagenesis and PCR-mediated mutagenesis. Preferably, conservative amino acid substitutions are made at one or more predicted non-essential amino acid residues. A “conservative amino acid substitution” is one in which the amino acid residue is replaced with an amino acid residue having a similar side chain. Families of amino acid residues having similar side chains have been defined in the art. These families include amino acids with basic side chains (e.g., lysine, arginine, histidine), acidic side chains (e.g., aspartic acid, glutamic acid), uncharged polar side chains (e.g., glycine, asparagine, glutamine, serine, threonine, tyrosine, cysteine), nonpolar side chains (e.g., alanine, valine, leucine, isoleucine, proline, phenylalanine, methionine, tryptophan), beta-branched side chains (e.g., threonine, valine, isoleucine) and aromatic side chains (e.g., tyrosine, phenylalanine, tryptophan, histidine). Thus, a predicted nonessential amino acid residue in an MCP protein is preferably replaced with another amino acid residue from the same side chain family. Alternatively, in another embodiment, mutations can be introduced randomly along all or part of an MCP coding sequence, such as by saturation mutagenesis, and the resultant mutants can be screened for an MCP activity described herein to identify mutants that retain MCP activity. Following mutagenesis of one of the sequences of Appendix A, the encoded protein can be expressed recombinantly and the activity of the protein can be determined using, for example, assays described herein (see Example 8 of the Exemplification).

[0073] In addition to the nucleic acid molecules encoding MCP proteins described above, another aspect of the invention pertains to isolated nucleic acid molecules which are antisense thereto. An “antisense” nucleic acid comprises a nucleotide sequence which is complementary to a “sense” nucleic acid encoding a protein, e.g., complementary to the coding strand of a double-stranded cDNA molecule or complementary to an mRNA sequence. Accordingly, an antisense nucleic acid can hydrogen bond to a sense nucleic acid. The antisense nucleic acid can be complementary to an entire MCP coding strand, or to only a portion thereof. In one embodiment, an antisense nucleic acid molecule is antisense to a “coding region” of the coding strand of a nucleotide sequence encoding an MCP protein. The term “coding region” refers to the region of the nucleotide sequence comprising codons which are translated into amino acid residues (e.g., the entire coding region of SEQ ID NO. 1 (RXN01638) comprises nucleotides 1 to 900). In another embodiment, the antisense nucleic acid molecule is antisense to a “noncoding region” of the coding strand of a nucleotide sequence encoding MCP. The term “noncoding region” refers to 5′ and 3′ sequences which flank the coding region that are not translated into amino acids (i.e., also referred to as 5′ and 3′ untranslated regions).

[0074] Given the coding strand sequences encoding MCP disclosed herein (e.g., the sequences set forth in Appendix A), antisense nucleic acids of the invention can be designed according to the rules of Watson and Crick base pairing. The antisense nucleic acid molecule can be complementary to the entire coding region of MCP mRNA, but more preferably is an oligonucleotide which is antisense to only a portion of the coding or noncoding region of MCP mRNA. For example, the antisense oligonucleotide can be complementary to the region surrounding the translation start site of MCP mRNA. An antisense oligonucleotide can be, for example, about 5, 10, 15, 20, 25, 30, 35, 40, 45 or 50 nucleotides in length. An antisense nucleic acid of the invention can be constructed by chemical synthesis and enzymatic ligation reactions using procedures known in the art. For example, an antisense nucleic acid (e.g., an antisense oligonucleotide) can be chemically synthesized using naturally occurring nucleotides or variously modified nucleotides designed to increase the biological stability of the molecules or to increase the physical stability of the duplex formed between the antisense and sense nucleic acids, e.g., phosphorothioate derivatives and acridine substituted nucleotides can be used. Examples of modified nucleotides which can be used to generate the antisense nucleic acid include 5-fluorouracil, 5-bromouracil, 5-chlorouracil, 5-iodouracil, hypoxanthine, xanthine, 4-acetylcytosine, 5-(carboxyhydroxylmethyl) uracil, 5-carboxymethylaminomethyl-2-thiouridine, 5-carboxymethylaminomethyluracil, dihydrouracil, beta-D-galactosylqueosine, inosine, N6-isopentenyladenine, 1-methylguanine, 1-methylinosine, 2,2-dimethylguanine, 2-methyladenine, 2-methylguanine, 3-methylcytosine, 5-methylcytosine, N6-adenine, 7-methylguanine, 5-methylaminomethyluracil, 5-methoxyaminomethyl-2-thiouracil, beta-D-mannosylqueosine, 5′-methoxycarboxymethyluracil, 5-methoxyuracil, 2-methylthio-N6-isopentenyladenine, uracil-5-oxyacetic acid (v), wybutoxosine, pseudouracil, queosine, 2-thiocytosine, 5-methyl-2-thiouracil, 2-thiouracil, 4-thiouracil, 5-methyluracil, uracil-5-oxyacetic acid methylester, uracil-5-oxyacetic acid (v), 5-methyl-2-thiouracil, 3-(3-amino-3-N-2-carboxypropyl) uracil, (acp3)w, and 2,6-diaminopurine. Alternatively, the antisense nucleic acid can be produced biologically using an expression vector into which a nucleic acid has been subcloned in an antisense orientation (i.e., RNA transcribed from the inserted nucleic acid will be of an antisense orientation to a target nucleic acid of interest, described further in the following subsection).

[0075] The antisense nucleic acid molecules of the invention are typically administered to a cell or generated in situ such that they hybridize with or bind to cellular mRNA and/or genomic DNA encoding an MCP protein to thereby inhibit expression of the protein, e.g., by inhibiting transcription and/or translation. The hybridization can be by conventional nucleotide complementarity to form a stable duplex, or, for example, in the case of an antisense nucleic acid molecule which binds to DNA duplexes, through specific interactions in the major groove of the double helix. The antisense molecule can be modified such that it specifically binds to a receptor or an antigen expressed on a selected cell surface, e.g., by linking the antisense nucleic acid molecule to a peptide or an antibody which binds to a cell surface receptor or antigen. The antisense nucleic acid molecule can also be delivered to cells using the vectors described herein. To achieve sufficient intracellular concentrations of the antisense molecules, vector constructs in which the antisense nucleic acid molecule is placed under the control of a strong prokaryotic, viral, or eukaryotic promoter are preferred.

[0076] In yet another embodiment, the antisense nucleic acid molecule of the invention is an α-anomeric nucleic acid molecule. An α-anomeric nucleic acid molecule forms specific double-stranded hybrids with complementary RNA in which, contrary to the usual O-units, the strands run parallel to each other (Gaultier et al. (1987) Nucleic Acids. Res. 15:6625-6641). The antisense nucleic acid molecule can also comprise a 2′—O— methylribonucleotide (Inoue et al. (1987) Nucleic Acids Res. 15:6131-6148) or a chimeric RNA-DNA analogue (Inoue et al. (1987) FEBS Lett. 215:327-330).

[0077] In still another embodiment, an antisense nucleic acid of the invention is a ribozyme. Ribozymes are catalytic RNA molecules with ribonuclease activity which are capable of cleaving a single-stranded nucleic acid, such as an mRNA, to which they have a complementary region. Thus, ribozymes (e.g., hammerhead ribozymes (described in Haselhoff and Gerlach (1988) Nature 334:585-591)) can be used to catalytically cleave MCP mRNA transcripts to thereby inhibit translation of MCP mRNA. A ribozyme having specificity for an MCP-encoding nucleic acid can be designed based upon the nucleotide sequence of an MCP DNA disclosed herein (i.e., SEQ ID NO. 1 (RXN01368) in Appendix A). For example, a derivative of a Tetrahymena L-19 IVS RNA can be constructed in which the nucleotide sequence of the active site is complementary to the nucleotide sequence to be cleaved in an MCP-encoding mRNA. See, e.g., Cech et al. U.S. Pat. No. 4,987,071 and Cech et al. U.S. Pat. No. 5,116,742. Alternatively, MCP mRNA can be used to select a catalytic RNA having a specific ribonuclease activity from a pool of RNA molecules. See, e.g., Bartel, D. and Szostak, J. W. (1993) Science 261:1411-1418.

[0078] Alternatively, MCP gene expression can be inhibited by targeting nucleotide sequences complementary to the regulatory region of an MCP nucleotide sequence (e.g., an MCP promoter and/or enhancers) to form triple helical structures that prevent transcription of an MCP gene in target cells. See generally, Helene, C. (1991) Anticancer Drug Des. 6(6):569-84; Helene, C. et al. (1992) Ann. N.Y. Acad. Sci. 660:27-36; and Maher, L. J. (1992) Bioassays 14(12):807-15.

B. Recombinant Expression Vectors and Host Cells

[0079] Another aspect of the invention pertains to vectors, preferably expression vectors, containing a nucleic acid encoding an MCP protein (or a portion thereof). As used herein, the term “vector” refers to a nucleic acid molecule capable of transporting another nucleic acid to which it has been linked. One type of vector is a “plasmid”, which refers to a circular double stranded DNA loop into which additional DNA segments can be ligated. Another type of vector is a viral vector, wherein additional DNA segments can be ligated into the viral genome. Certain vectors are capable of autonomous replication in a host cell into which they are introduced (e.g., bacterial vectors having a bacterial origin of replication and episomal mammalian vectors). Other vectors (e.g., non-episomal mammalian vectors) are integrated into the genome of a host cell upon introduction into the host cell, and thereby are replicated along with the host genome. Moreover, certain vectors are capable of directing the expression of genes to which they are operatively linked. Such vectors are referred to herein as “expression vectors”. In general, expression vectors of utility in recombinant DNA techniques are often in the form of plasmids. In the present specification, “plasmid” and “vector” can be used interchangeably as the plasmid is the most commonly used form of vector. However, the invention is intended to include such other forms of expression vectors, such as viral vectors (e.g., replication defective retroviruses, adenoviruses and adeno-associated viruses), which serve equivalent functions.

[0080] The recombinant expression vectors of the invention comprise a nucleic acid of the invention in a form suitable for expression of the nucleic acid in a host cell, which means that the recombinant expression vectors include one or more regulatory sequences, selected on the basis of the host cells to be used for expression, which is operatively linked to the nucleic acid sequence to be expressed. Within a recombinant expression vector, “operably linked” is intended to mean that the nucleotide sequence of interest is linked to the regulatory sequence(s) in a manner which allows for expression of the nucleotide sequence (e.g., in an in vitro transcription/translation system or in a host cell when the vector is introduced into the host cell). The term “regulatory sequence” is intended to include promoters, repressor binding sites, activator binding sites, enhancer regions and other expression control elements (e.g., terminators, other elements of mRNA secondary structure, or polyadenylation signals). Such regulatory sequences are described, for example, in Goeddel; Gene Expression Technology: Methods in Enzymology 185, Academic Press, San Diego, Calif. (1990). Regulatory sequences include those which direct constitutive expression of a nucleotide sequence in many types of host cell and those which direct expression of the nucleotide sequence only in certain host cells. Preferred regulatory sequences are, for example, promoters such as cos-, tac-, trp-, tet-, trp-tet-, lpp-, lac-, lpp-lac-, lacI^{q}-, T7-, T5-, T3-, gal-, trc-, ara-, SP6-, arny, SPO2, λ-P_{R}- or λ P_{L}, which are used preferably in bacteria. Additional regulatory sequences are, for example, promoters from yeasts and fungi, such as ADC 1, MFα, AC, P-60, CYC1, GAPDH, TEF, rp28, ADH, promoters from plants such as CaMV/35S, SSU, OCS, lib4, usp, STLS1, B33, nos or ubiquitin- or phaseolin-promoters. It is also possible to use artificial promoters. It will be appreciated by those of ordinary skill in the art that the design of the expression vector can depend on such factors as the choice of the host cell to be transformed, the level of expression of protein desired, etc. The expression vectors of the invention can be introduced into host cells to thereby produce proteins or peptides, including fusion proteins or peptides, encoded by nucleic acids as described herein (e.g., MCP proteins, mutant forms of MCP proteins, fusion proteins, etc.).

[0081] The recombinant expression vectors of the invention can be designed for expression of MCP proteins in prokaryotic or eukaryotic cells. For example, MCP genes can be expressed in bacterial cells such as C. glutamicum, insect cells (using baculovirus expression vectors), yeast and other fungal cells (see Romanos, M. A. et al. (1992) “Foreign gene expression in yeast: a review”, Yeast 8: 423-488; van den Hondel, C. A. M. J. J. et al. (1991) “Heterologous gene expression in filamentous fungi” in: More Gene Manipulations in Fungi, J. W. Bennet & L. L. Lasure, eds., p. 396-428: Academic Press: San Diego; and van den Hondel, C. A. M. J. J. & Punt, P. J. (1991) “Gene transfer systems and vector development for filamentous fungi, in: Applied Molecular Genetics of Fungi, Peberdy, J. F. et al., eds., p. 1-28, Cambridge University Press: Cambridge), algae and multicellular plant cells (see Schmidt, R. and Willmitzer, L. (1988) High efficiency Agrobacterium tumefactiens—mediated transformation of Arabidopsis thaliana leaf and cotyledon explants” Plant Cell Rep.: 583-586), or mammalian cells. Suitable host cells are discussed further in Goeddel, Gene Expression Technology: Methods in Enzymology 185, Academic Press, San Diego, Calif. (1990). Alternatively, the recombinant expression vector can be transcribed and translated in vitro, for example using T7 promoter regulatory sequences and T7 polymerase.

[0082] Expression of proteins in prokaryotes is most often carried out with vectors containing constitutive or inducible promoters directing the expression of either fusion or non-fusion proteins. Fusion vectors add a number of amino acids to a protein encoded therein, usually to the amino terminus of the recombinant protein. Such fusion vectors typically serve three purposes: 1) to increase expression of recombinant protein; 2) to increase the solubility of the recombinant protein; and 3) to aid in the purification of the recombinant protein by acting as a ligand in affinity purification. Often, in fusion expression vectors, a proteolytic cleavage site is introduced at the junction of the fusion moiety and the recombinant protein to enable separation of the recombinant protein from the fusion moiety subsequent to purification of the fusion protein. Such enzymes, and their cognate recognition sequences, include Factor Xa, thrombin and enterokinase.

[0083] Typical fusion expression vectors include pGEX (Pharmacia Biotech Inc; Smith, D. B. and Johnson, K. S. (1988) Gene 67:31-40), pMAL (New England Biolabs, Beverly, Mass.) and pRIT5 (Pharmacia, Piscataway, N.J.) which fuse glutathione S-transferase (GST), maltose E binding protein, or protein A, respectively, to the target recombinant protein. In one embodiment, the coding sequence of the MCP protein is cloned into a pGEX expression vector to create a vector encoding a fusion protein comprising, from the N-terminus to the C-terminus, GST-thrombin cleavage site-X protein. The fusion protein can be purified by affinity chromatography using glutathione-agarose resin. Recombinant MCP protein unfused to GST can be recovered by cleavage of the fusion protein with thrombin.

[0084] Examples of suitable inducible non-fusion E. coli expression vectors include pTrc (Amann et al., (1988) Gene 69:301-315), pLG338, pACYC184, pBR322, pUC18, pUC19, pKC30, pRep4, pHS1, pHS2, pPLc236, pMBL24, pLG200, pUR290, pIN-III113-B1, λgt11, pBdCl, and pET 11d (Studier et al., Gene Expression Technology: Methods in Enzymology 185, Academic Press, San Diego, Calif. (1990) 60-89; and Pouwels et al., eds. (1985) Cloning Vectors. Elsevier: New York IBSN 0 444 904018). Target gene expression from the pTrc vector relies on host RNA polymerase transcription from a hybrid trp-lac fusion promoter. Target gene expression from the pET 11d vector relies on transcription from a T7 gn10-lac fusion promoter mediated by a coexpressed viral RNA polymerase (T7 gn1). This viral polymerase is supplied by host strains BL21 (DE3) or HMS 174(DE3) from a resident λ prophage harboring a T7 gn1 gene under the transcriptional control of the lacUV 5 promoter. For transformation of other varieties of bacteria, appropriate vectors may be selected. For example, the plasmids pIJ101, pIJ364, pIJ702 and pIJ361 are known to be useful in transforming Streptomyces, while plasmids pUB 110, pC 194, or pBD214 are suited for transformation of Bacillus species. Several plasmids of use in the transfer of genetic information into Corynebacterium include pHM 1519, pBL1, pSA77, or pAJ667 (Pouwels et al., eds. (1985) Cloning Vectors. Elsevier: New York IBSN 0 444 904018).

[0085] One strategy to maximize recombinant protein expression is to express the protein in a host bacteria with an impaired capacity to proteolytically cleave the recombinant protein (Gottesman, S., Gene Expression Technology: Methods in Enzymology 185, Academic Press, San Diego, Calif. (1990) 119-128). Another strategy is to alter the nucleic acid sequence of the nucleic acid to be inserted into an expression vector so that the individual codons for each amino acid are those preferentially utilized in the bacterium chosen for expression, such as C. glutamicum(Wada et al. (1992) Nucleic Acids Res. 20:2111-2118). Such alteration of nucleic acid sequences of the invention can be carried out by standard DNA synthesis techniques.

[0086] In another embodiment, the MCP protein expression vector is a yeast expression vector. Examples of vectors for expression in yeast S. cerevisiae include pYepSec1 (Baldari, et al., (1987) Embo J. 6:229-234), 2μ, pAG-1, Yep6, Yep13, pEMBLYe23, pMFa (Kuijan and Herskowitz, (1982) Cell 30:933-943), pJRY88 (Schultz et al., (1987) Gene 54:113-123), and pYES2 (Invitrogen Corporation, San Diego, Calif.). Vectors and methods for the construction of vectors appropriate for use in other fungi, such as the filamentous fungi, include those detailed in: van den Hondel, C. A. M. J. J. & Punt, P. J. (1991) “Gene transfer systems and vector development for filamentous fungi, in: Applied Molecular Genetics of Fungi, J. F. Peberdy, et al., eds., p. 1-28, Cambridge University Press: Cambridge, and Pouwels et al., eds. (1985) Cloning Vectors. Elsevier: New York (IBSN 0 444 904018).

[0087] Alternatively, the MCP proteins of the invention can be expressed in insect cells using baculovirus expression vectors. Baculovirus vectors available for expression of proteins in cultured insect cells (e.g., Sf 9 cells) include the pAc series (Smith et al. (1983) Mol. Cell. Biol. 3:2156-2165) and the pVL series (Lucklow and Summers (1989) Virology 170:31-39).

[0088] In another embodiment, the MCP proteins of the invention may be expressed in unicellular plant cells (such as algae) or in plant cells from higher plants (e.g., the spermatophytes, such as crop plants). Examples of plant expression vectors include those detailed in: Becker, D., Kemper, E., Schell, J. and Masterson, R. (1992) “New plant binary vectors with selectable markers located proximal to the left border”, Plant Mol. Biol. 20: 1195-1197; and Bevan, M. W. (1984) “Binary Agrobacterium vectors for plant transformation”, Nucl. Acid Res. 12: 8711-8721, and include pLGV23, pGHlac+, pBIN19, pAK2004, and pDH51 (Pouwels et al., eds. (1985) Cloning Vectors. Elsevier: New York IBSN 0 444 904018).

[0089] In yet another embodiment, a nucleic acid of the invention is expressed in mammalian cells using a mammalian expression vector. Examples of mammalian expression vectors include pCDM8 (Seed, B. (1987) Nature 329:840) and pMT2PC (Kaufman et al. (1987) EMBO J. 6:187-195). When used in mammalian cells, the expression vector's control functions are often provided by viral regulatory elements. For example, commonly used promoters are derived from polyoma, Adenovirus 2, cytomegalovirus and Simian Virus 40. For other suitable expression systems for both prokaryotic and eukaryotic cells see chapters 16 and 17 of Sambrook, J., Fritsh, E. F., and Maniatis, T. Molecular Cloning: A Laboratory Manual. 2nd, ed., Cold Spring Harbor Laboratory, Cold Spring Harbor Laboratory Press, Cold Spring Harbor, N.Y., 1989.

[0090] In another embodiment, the recombinant mammalian expression vector is capable of directing expression of the nucleic acid preferentially in a particular cell type (e.g., tissue-specific regulatory elements are used to express the nucleic acid). Tissue-specific regulatory elements are known in the art. Non-limiting examples of suitable tissue-specific promoters include the albumin promoter (liver-specific; Pinkert et al. (1987) Genes Dev. 1:268-277), lymphoid-specific promoters (Calame and Eaton (1988) Adv. Immunol. 43:235-275), in particular promoters of T cell receptors (Winoto and Baltimore (1989) EMBO J. 8:729-733) and immunoglobulins (Banerji et al. (1983) Cell 33:729-740; Queen and Baltimore (1983) Cell 33:741-748), neuron-specific promoters (e.g., the neurofilament promoter; Byrne and Ruddle (1989) PNAS 86:5473-5477), pancreas-specific promoters (Edlund et al. (1985) Science 230:912-916), and mammary gland-specific promoters (e.g., milk whey promoter; U.S. Pat. No. 4,873,316 and European Application Publication No. 264,166). Developmentally-regulated promoters are also encompassed, for example the murine hox promoters (Kessel and Gruss (1990) Science 249:374-379) and the α-fetoprotein promoter (Campes and Tilghman (1989) Genes Dev. 3:537-546).

[0091] The invention further provides a recombinant expression vector comprising a DNA molecule of the invention cloned into the expression vector in an antisense orientation. That is, the DNA molecule is operatively linked to a regulatory sequence in a manner which allows for expression (by transcription of the DNA molecule) of an RNA molecule which is antisense to MCP mRNA. Regulatory sequences operatively linked to a nucleic acid cloned in the antisense orientation can be chosen which direct the continuous expression of the antisense RNA molecule in a variety of cell types, for instance viral promoters and/or enhancers, or regulatory sequences can be chosen which direct constitutive, tissue specific or cell type specific expression of antisense RNA. The antisense expression vector can be in the form of a recombinant plasmid, phagemid or attenuated virus in which antisense nucleic acids are produced under the control of a high efficiency regulatory region, the activity of which can be determined by the cell type into which the vector is introduced. For a discussion of the regulation of gene expression using antisense genes see Weintraub, H. et al. (1986) “Antisense RNA as a molecular tool for genetic analysis”, Reviews—Trends in Genetics, Vol. 1(1).

[0092] Another aspect of the invention pertains to host cells into which a recombinant expression vector of the invention has been introduced. The terms “host cell” and “recombinant host cell” are used interchangeably herein. It is understood that such terms refer not only to the particular subject cell but to the progeny or potential progeny of such a cell. Because certain modifications may occur in succeeding generations due to either mutation or environmental influences, such progeny may not, in fact, be identical to the parent cell, but are still included within the scope of the term as used herein.

[0093] A host cell can be any prokaryotic or eukaryotic cell. For example, an MCP protein can be expressed in bacterial cells such as C. glutamicum, insect cells, yeast or mammalian cells (such as Chinese hamster ovary cells (CHO) or COS cells). Other suitable host cells are known to those of ordinary skill in the art. Microorganisms related to Corynebacterium glutamicum which may be conveniently used as host cells for the nucleic acid and protein molecules of the invention are set forth in Table 3.

[0094] Vector DNA can be introduced into prokaryotic or eukaryotic cells via conventional transformation or transfection techniques. As used herein, the terms “transformation”, “transfection”, “conjugation” and “transduction” are intended to refer to a variety of art-recognized techniques for introducing foreign nucleic acid (e.g., linear DNA or RNA (e.g., a linearized vector or a gene construct alone without a vector) or nucleic acid in the form of a vector (e.g., a plasmid, phage, phasmid, phagemid, transposon or other DNA) into a host cell, including using natural competence, chemical mediated transfer, calcium phosphate or calcium chloride co-precipitation, DEAE-dextran-mediated transfection, lipofection, or electroporation. Suitable methods for transforming or transfecting host cells can be found in Sambrook, et al. (Molecular Cloning: A Laboratory Manual. 2nd, ed, Cold Spring Harbor Laboratory, Cold Spring Harbor Laboratory Press, Cold Spring Harbor, N.Y., 1989), and other laboratory manuals.

[0095] For stable transfection of mammalian cells, it is known that, depending upon the expression vector and transfection technique used, only a small fraction of cells may integrate the foreign DNA into their genome. In order to identify and select these integrants, a gene that encodes a selectable marker (e.g., resistance to antibiotics) is generally introduced into the host cells along with the gene of interest. Preferred selectable markers include those which confer resistance to drugs, such as G418, hygromycin and methotrexate. Nucleic acid encoding a selectable marker can be introduced into a host cell on the same vector as that encoding an MCP protein or can be introduced on a separate vector. Cells stably transfected with the introduced nucleic acid can be identified by, for example, drug selection (e.g., cells that have incorporated the selectable marker gene will survive, while the other cells die).

[0096] To create a homologous recombinant microorganism, a vector is prepared which contains at least a portion of an MCP gene into which a deletion, addition or substitution has been introduced to thereby alter, e.g, functionally disrupt, the MCP gene. Preferably, this MCP gene is a Corynebacterium glutamicum MCP gene, but it can be a homologue from a related bacterium or even from a mammalian, yeast, or insect source. In a preferred embodiment, the vector is designed such that, upon homologous recombination, the endogenous MCP gene is functionally disrupted (i.e., no longer encodes a functional protein; also referred to as a “knock out” vector). Alternatively, the vector can be designed such that, upon homologous recombination, the endogenous MCP gene is mutated or otherwise altered but still encodes functional protein (e.g., the upstream regulatory region can be altered to thereby alter the expression of the endogenous MCP protein). In the homologous recombination vector, the altered portion of the MCP gene is flanked at its 5′ and 3′ ends by additional nucleic acid of the MCP gene to allow for homologous recombination to occur between the exogenous MCP gene carried by the vector and an endogenous MCP gene in a microorganism. The additional flanking MCP nucleic acid is of sufficient length for successful homologous recombination with the endogenous gene. Typically, less than one kilobase of flanking DNA (both at the 5′ and 3′ ends) is included in the vector (see e.g., Thomas, K. R., and Capecchi, M. R. (1987) Cell 51: 503 for a description of homologous recombination vectors). The vector is introduced into a microorganism (e.g., by electroporation) and cells in which the introduced MCP gene has homologously recombined with the endogenous MCP gene are selected, using art-known techniques.

[0097] In another embodiment, recombinant microorganisms can be produced which contain selected systems which allow for regulated expression of the introduced gene. For example, inclusion of an MCP gene on a vector placing it under control of the lac operon permits expression of the MCP gene in the presence of IPTG. Such regulatory systems are well known in the art.

[0098] In another embodiment, an endogenous MCP gene in a host cell is disrupted (e.g., by homologous recombination or other genetic means known in the art) such that expression of its protein product does not occur. In another embodiment, an endogenous or introduced MCP gene in a host cell has been altered by one or more point mutations, deletions, or inversions, but still encodes a functional MCP protein. In still another embodiment, one or more of the regulatory regions (e.g, a promoter, repressor, or inducer) of an MCP gene in a microorganism has been altered (e.g., by deletion, truncation, inversion, or point mutation) such that the expression of the MCP gene is modulated. One of ordinary skill in the art will appreciate that host cells containing more than one of the described MCP gene and protein modifications may be readily produced using the methods of the invention, and are meant to be included in the present invention.

[0099] A host cell of the invention, such as a prokaryotic or eukaryotic host cell in culture, can be used to produce (i.e., express) an MCP protein. Accordingly, the invention further provides methods for producing MCP proteins using the host cells of the invention. In one embodiment, the method comprises culturing the host cell of invention (into which a recombinant expression vector encoding an MCP protein has been introduced, or into which genome has been introduced a gene encoding a wild-type or altered MCP protein) in a suitable medium until MCP protein is produced. In another embodiment, the method further comprises isolating MCP proteins from the medium or the host cell.

C. Isolated MCP Proteins

[0100] Another aspect of the invention pertains to isolated MCP proteins, and biologically active portions thereof. An “isolated” or “purified” protein or biologically active portion thereof is substantially free of cellular material when produced by recombinant DNA techniques, or chemical precursors or other chemicals when chemically synthesized. The language “substantially free of cellular material” includes preparations of MCP protein in which the protein is separated from cellular components of the cells in which it is naturally or recombinantly produced. In one embodiment, the language “substantially free of cellular material” includes preparations of MCP protein having less than about 30% (by dry weight) of non-MCP protein (also referred to herein as a “contaminating protein”), more preferably less than about 20% of non-MCP protein, still more preferably less than about 10% of non-MCP protein, and most preferably less than about 5% non-MCP protein. When the MCP protein or biologically active portion thereof is recombinantly produced, it is also preferably substantially free of culture medium, i.e., culture medium represents less than about 20%, more preferably less than about 10%, and most preferably less than about 5% of the volume of the protein preparation. The language “substantially free of chemical precursors or other chemicals” includes preparations of MCP protein in which the protein is separated from chemical precursors or other chemicals which are involved in the synthesis of the protein. In one embodiment, the language “substantially free of chemical precursors or other chemicals” includes preparations of MCP protein having less than about 30% (by dry weight) of chemical precursors or non-MCP chemicals, more preferably less than about 20% chemical precursors or non-MCP chemicals, still more preferably less than about 10% chemical precursors or non-MCP chemicals, and most preferably less than about 5% chemical precursors or non-MCP chemicals. In preferred embodiments, isolated proteins or biologically active portions thereof lack contaminating proteins from the same organism from which the MCP protein is derived. Typically, such proteins are produced by recombinant expression of, for example, a C. glutamicum MCP protein in a microorganism such as C. glutamicum.

[0101] An isolated MCP protein or a portion thereof of the invention is able to modulate the yield, production, and/or efficiency of production of one or more fine chemicals from C. glutamicum, to degrade hydrocarbons, to oxidize terpenoids, to serve as a target for drug development, or to serve as an identifying marker for C. glutamicum or related organisms. In preferred embodiments, the protein or portion thereof comprises an amino acid sequence which is sufficiently homologous to an amino acid sequence of Appendix B such that the protein or portion thereof maintains the ability to modulate the yield, production, and/or efficiency of production of one or more fine chemicals from C. glutamicum, to degrade hydrocarbons, to oxidize terpenoids, to serve as a target for drug development, or to serve as an identifying marker for C. glutamicum or related organisms. The portion of the protein is preferably a biologically active portion as described herein. In another preferred embodiment, an MCP protein of the invention has an amino acid sequence shown in Appendix B. In yet another preferred embodiment, the MCP protein has an amino acid sequence which is encoded by a nucleotide sequence which hybridizes, e.g., hybridizes under stringent conditions, to a nucleotide sequence of Appendix A. In still another preferred embodiment, the MCP protein has an amino acid sequence which is encoded by a nucleotide sequence that is at least about 50%, 51%, 52%, 53%, 54%, 55%, 56%, 57%, 58%, 59%, or 60%, preferably at least about 61%, 62%, 63%, 64%, 65%, 66%, 67%, 68%, 69%, or 70%, more preferably at least about 71%, 72%, 73%, 74%, 75%, 76%, 77%, 78%, 79%, or 80%, 81%, 82%, 83%, 84%, 85%, 86%, 87%, 88%, 89%, or 90%, or 91%, 92%, 93%, 94%, and even more preferably at least about 95%, 96%, 97%, 98%, 99% or more homologous to one of the nucleic acid sequences of Appendix A, or a portion thereof. Ranges and identity values intermediate to the above-recited values, (e.g., 70-90% identical or 80-95% identical) are also intended to be encompassed by the present invention. For example, ranges of identity values using a combination of any of the above values recited as upper and/or lower limits are intended to be included. The preferred MCP proteins of the present invention also preferably possess at least one of the MCP activities described herein. For example, a preferred MCP protein of the present invention includes an amino acid sequence encoded by a nucleotide sequence which hybridizes, e.g., hybridizes under stringent conditions, to a nucleotide sequence of Appendix A, and which is able to modulate the yield, production, and/or efficiency of production of one or more fine chemicals from C. glutamicum, to degrade hydrocarbons, to oxidize terpenoids, to serve as a target for drug development, or to serve as an identifying marker for C. glutamicum or related organisms.

[0102] In other embodiments, the MCP protein is substantially homologous to an amino acid sequence of Appendix B and retains the functional activity of the protein of one of the sequences of Appendix B yet differs in amino acid sequence due to natural variation or mutagenesis, as described in detail in subsection I above. Accordingly, in another embodiment, the MCP protein is a protein which comprises an amino acid sequence which is at least about 50%, 51%, 52%, 53%, 54%, 55%, 56%, 57%, 58%, 59%, or 60%, preferably at least about 61%, 62%, 63%, 64%, 65%, 66%, 67%, 68%, 69%, or 70%, more preferably at least about 71%, 72%, 73%, 74%, 75%, 76%, 77%, 78%, 79%, or 80%, 81%, 82%, 83%, 84%, 85%, 86%, 87%, 88%, 89%, or 90%, or 91%, 92%, 93%, 94%, and even more preferably at least about 95%, 96%, 97%, 98%, 99% or more homologous to an entire amino acid sequence of Appendix B and which has at least one of the MCP activities described herein. Ranges and identity values intermediate to the above-recited values, (e.g., 70-90% identical or 80-95% identical) are also intended to be encompassed by the present invention. For example, ranges of identity values using a combination of any of the above values recited as upper and/or lower limits are intended to be included. In another embodiment, the invention pertains to a full length C. glutamicum protein which is substantially homologous to an entire amino acid sequence of Appendix B.

[0103] Biologically active portions of an MCP protein include peptides comprising amino acid sequences derived from the amino acid sequence of an MCP protein, e.g., an amino acid sequence shown in Appendix B or the amino acid sequence of a protein homologous to an MCP protein, which include fewer amino acids than a full length MCP protein or the full length protein which is homologous to an MCP protein, and exhibit at least one activity of an MCP protein. Typically, biologically active portions (peptides, e.g., peptides which are, for example, 5, 10, 15, 20, 30, 35, 36, 37, 38, 39, 40, 50, 100 or more amino acids in length) comprise a domain or motif with at least one activity of an MCP protein. Moreover, other biologically active portions, in which other regions of the protein are deleted, can be prepared by recombinant techniques and evaluated for one or more of the activities described herein. Preferably, the biologically active portions of an MCP protein include one or more selected domains/motifs or portions thereof having biological activity.

[0104] MCP proteins are preferably produced by recombinant DNA techniques. For example, a nucleic acid molecule encoding the protein is cloned into an expression vector (as described above), the expression vector is introduced into a host cell (as described above) and the MCP protein is expressed in the host cell. The MCP protein can then be isolated from the cells by an appropriate purification scheme using standard protein purification techniques. Alternative to recombinant expression, an MCP protein, polypeptide, or peptide can be synthesized chemically using standard peptide synthesis techniques. Moreover, native MCP protein can be isolated from cells (e.g., endothelial cells, bacterial cells, fungal cells or other cells), for example using an anti-MCP antibody, which can be produced by standard techniques utilizing an MCP protein or fragment thereof of this invention.

[0105] The invention also provides MCP chimeric or fusion proteins. As used herein, an MCP “chimeric protein” or “fusion protein” comprises an MCP polypeptide operatively linked to a non-MCP polypeptide. An “MCP polypeptide” refers to a polypeptide having an amino acid sequence corresponding to an MCP protein, whereas a “non-MCP polypeptide” refers to a polypeptide having an amino acid sequence corresponding to a protein which is not substantially homologous to the MCP protein, e.g., a protein which is different from the MCP protein and which is derived from the same or a different organism. Within the fusion protein, the term “operatively linked” is intended to indicate that the MCP polypeptide and the non-MCP polypeptide are fused in-frame to each other. The non-MCP polypeptide can be fused to the N-terminus or C-terminus of the MCP polypeptide. For example, in one embodiment the fusion protein is a GST-MCP fusion protein in which the MCP sequences are fused to the C-terminus of the GST sequences. Such fusion proteins can facilitate the purification of recombinant MCP proteins. In another embodiment, the fusion protein is an MCP protein containing a heterologous signal sequence at its N-terminus. In certain host cells (e.g., mammalian host cells, bacterial host cells, fungal host cells), expression and/or secretion of an MCP protein can be increased through use of a heterologous signal sequence.

[0106] Preferably, an MCP chimeric or fusion protein of the invention is produced by standard recombinant DNA techniques. For example, DNA fragments coding for the different polypeptide sequences are ligated together in-frame in accordance with conventional techniques, for example by employing blunt-ended or stagger-ended termini for ligation, restriction enzyme digestion to provide for appropriate termini, filling-in of cohesive ends as appropriate, alkaline phosphatase treatment to avoid undesirable joining, and enzymatic ligation. In another embodiment, the fusion gene can be synthesized by conventional techniques including automated DNA synthesizers. Alternatively, PCR amplification of gene fragments can be carried out using anchor primers which give rise to complementary overhangs between two consecutive gene fragments which can subsequently be annealed and reamplified to generate a chimeric gene sequence (see, for example, Current Protocols in Molecular Biology, eds. Ausubel et al. John Wiley & Sons: 1992). Moreover, many expression vectors are commercially available that already encode a fusion moiety (e.g., a GST polypeptide). An MCP-encoding nucleic acid can be cloned into such an expression vector such that the fusion moiety is linked in-frame to the MCP protein.

[0107] Homologues of the MCP protein can be generated by mutagenesis, e.g., discrete point mutation or truncation of the MCP protein. As used herein, the term “homologue” refers to a variant form of the MCP protein which acts as an agonist or antagonist of the activity of the MCP protein. An agonist of the MCP protein can retain substantially the same, or a subset, of the biological activities of the MCP protein. An antagonist of the MCP protein can inhibit one or more of the activities of the naturally occurring form of the MCP protein, by, for example, competitively binding to a downstream or upstream member of a biochemical pathway which includes the MCP protein.

[0108] In an alternative embodiment, homologues of the MCP protein can be identified by screening combinatorial libraries of mutants, e.g., truncation mutants, of the MCP protein for MCP protein agonist or antagonist activity. In one embodiment, a variegated library of MCP variants is generated by combinatorial mutagenesis at the nucleic acid level and is encoded by a variegated gene library. A variegated library of MCP variants can be produced by, for example, enzymatically ligating a mixture of synthetic oligonucleotides into gene sequences such that a degenerate set of potential MCP sequences is expressible as individual polypeptides, or alternatively, as a set of larger fusion proteins (e.g., for phage display) containing the set of MCP sequences therein. There are a variety of methods which can be used to produce libraries of potential MCP homologues from a degenerate oligonucleotide sequence. Chemical synthesis of a degenerate gene sequence can be performed in an automatic DNA synthesizer, and the synthetic gene then ligated into an appropriate expression vector. Use of a degenerate set of genes allows for the provision, in one mixture, of all of the sequences encoding the desired set of potential MCP sequences. Methods for synthesizing degenerate oligonucleotides are known in the art (see, e.g., Narang, S. A. (1983) Tetrahedron 39:3; Itakura et al. (1984) Annu. Rev. Biochem. 53:323; Itakura et al. (1984) Science 198:1056; Ike et al. (1983) Nucleic Acid Res. 11:477.

[0109] In addition, libraries of fragments of the MCP protein coding can be used to generate a variegated population of MCP fragments for screening and subsequent selection of homologues of an MCP protein. In one embodiment, a library of coding sequence fragments can be generated by treating a double stranded PCR fragment of an MCP coding sequence with a nuclease under conditions wherein nicking occurs only about once per molecule, denaturing the double stranded DNA, renaturing the DNA to form double stranded DNA which can include sense/antisense pairs from different nicked products, removing single stranded portions from reformed duplexes by treatment with S1 nuclease, and ligating the resulting fragment library into an expression vector. By this method, an expression library can be derived which encodes N-terminal, C-terminal and internal fragments of various sizes of the MCP protein.

[0110] Several techniques are known in the art for screening gene products of combinatorial libraries made by point mutations or truncation, and for screening cDNA libraries for gene products having a selected property. Such techniques are adaptable for rapid screening of the gene libraries generated by the combinatorial mutagenesis of MCP homologues. The most widely used techniques, which are amenable to high through-put analysis, for screening large gene libraries typically include cloning the gene library into replicable expression vectors, transforming appropriate cells with the resulting library of vectors, and expressing the combinatorial genes under conditions in which detection of a desired activity facilitates isolation of the vector encoding the gene whose product was detected. Recrusive ensemble mutagenesis (REM), a new technique which enhances the frequency of functional mutants in the libraries, can be used in combination with the screening assays to identify MCP homologues (Arkin and Yourvan (1992) PNAS 89:7811-7815; Delgrave et al. (1993) Protein Engineering 6(3):327-331).

[0111] In another embodiment, cell based assays can be exploited to analyze a variegated MCP library, using methods well known in the art.

D. Uses and Methods of the Invention

[0112] The nucleic acid molecules, proteins, protein homologues, fusion proteins, primers, vectors, and host cells described herein can be used in one or more of the following methods: identification of C. glutamicum and related organisms; mapping of genomes of organisms related to C. glutamicum; identification and localization of C. glutamicum sequences of interest; evolutionary studies; determination of MCP protein regions required for function; modulation of an MCP protein activity; modulation of the activity of one or more metabolic pathways; and modulation of cellular production of a desired compound, such as a fine chemical.

[0113] The MCP nucleic acid molecules of the invention have a variety of uses. First, they may be used to identify an organism as being Corynebacterium glutamicum or a close relative thereof. Also, they may be used to identify the presence of C. glutamicum or a relative thereof in a mixed population of microorganisms. The invention provides the nucleic acid sequences of a number of C. glutamicum genes, and probes based thereon; by probing the extracted genomic DNA of a culture of a unique or mixed population of microorganisms under stringent conditions with a probe spanning a region of a C. glutamicum gene which is unique to this organism, one can ascertain whether this organism is present. Although Corynebacterium glutamicum itself is nonpathogenic, it is related to pathogenic species, such as Corynebacterium diphtheriae. Corynebacterium diphtheriae is the causative agent of diphtheria, a rapidly developing, acute, febrile infection which involves both local and systemic pathology. In this disease, a local lesion develops in the upper respiratory tract and involves necrotic injury to epithelial cells; the bacilli secrete toxin which is disseminated through this lesion to distal susceptible tissues of the body. Degenerative changes brought about by the inhibition of protein synthesis in these tissues, which include heart, muscle, peripheral nerves, adrenals, kidneys, liver and spleen, result in the systemic pathology of the disease. Diphtheria continues to have high incidence in many parts of the world, including Africa, Asia, Eastern Europe and the independent states of the former Soviet Union. An ongoing epidemic of diphtheria in the latter two regions has resulted in at least 5,000 deaths since 1990.

[0114] In one embodiment, the invention provides a method of identifying the presence or activity of Corynebacterium diphtheriae in a subject. This method includes detection of one or more of the nucleic acid or amino acid sequences of the invention (e.g., the sequences set forth in Appendix A or Appendix B) in a subject, thereby detecting the presence or activity of Corynebacterium diphtheriae in the subject. C. glutamicum and C. diphtheriae are related bacteria, and many of the nucleic acid and protein molecules in C. glutamicum are homologous to C. diphtheriae nucleic acid and protein molecules, and can therefore be used to detect C. diphtheriae in a subject.

[0115] To detect the presence of C. glutamicum in a sample, techniques well known in the art may be employed. Specifically, the cells in the sample may optionally first be cultured in a suitable liquid or on a suitable solid culture medium to increase the number of cells in the sample. These cells are lysed, and the total DNA content extracted and optionally purified to remove debris and protein material which may interfere with subsequent analysis. The polymerase chain reaction or a similar technique known in the art is performed (for general reference on methodologies commonly used for the amplification of nucleic acid sequences, see Mullis et al., U.S. Pat. No. 4,683,195, Mullis et al., U.S. Pat. No. 4,965,188, and Innis, M. A., and Gelfand, D. H., (1989) PCR Protocols, A guide to Methods and Applications, Academic Press, p. 3-12, and (1988) Biotechnology 6:1197, and International Patent Application No. WO89/01050) in which primers specific to an MCP nucleic acid molecule of the invention are incubated with the nucleic acid sample such that, if present in the sample, that particular MCP nucleic acid sequence will be amplified. The particular MCP nucleic acid to be amplified is selected based on its uniqueness to the C. glutamicum genome, or to the genomes of C. glutamicum and only a few closely related bacteria. The presence of the desired amplified product is thus indicative of the presence of C. glutamicum, or an organism closely related to C. glutamicum.

[0116] Further, the nucleic acid and protein molecules of the invention may serve as markers for specific regions of the genome. It is possible, using techniques well known in the art, to ascertain the physical location on the C. glutamicum genome of the MCP nucleic acid molecules of the invention, which in turn provides markers on the genome which can be used to aid in the placement of other nucleic acid molecules and genes on the genome map. Also, the nucleic acid molecules of the invention may be sufficiently homologous to the sequences of related bacterial species that these nucleic acid molecules may similarly permit the construction of a genomic map in such bacteria (e.g., Brevibacterium lactofermentum).

[0117] The nucleic acid molecules of the invention have utility not only in the mapping of the genome, but also for functional studies of C. glutamicum proteins. For example, to identify the region of the genome to which a particular C. glutamicum DNA-binding protein binds, the C. glutamicum genome could be digested, and the fragments incubated with the DNA-binding protein. Those which bind the protein may be additionally probed with the nucleic acid molecules of the invention, preferably with readily detectable labels; binding of such a nucleic acid molecule to the genome fragment enables the localization of the fragment to the genome map of C. glutamicum, and, when performed multiple times with different enzymes, facilitates a rapid determination of the nucleic acid sequence to which the protein binds.

[0118] The MCP nucleic acid molecules of the invention are also useful for evolutionary and protein structural studies. The metabolic processes in which the molecules of the invention participate are utilized by a wide variety of prokaryotic and eukaryotic cells; by comparing the sequences of the nucleic acid molecules of the present invention to those encoding similar enzymes from other organisms, the evolutionary relatedness of the organisms can be assessed. Similarly, such a comparison permits an assessment of which regions of the sequence are conserved and which are not, which may aid in determining those regions of the protein which are essential for the functioning of the enzyme. This type of determination is of value for protein engineering studies and may give an indication of what the protein can tolerate in terms of mutagenesis without losing function.

[0119] The MCP protein molecules of the invention may also be utilized as markers for the classification of an unknown bacterium as C. glutamicum, or for the identification of C. glutamicum or closely related bacteria in a sample. For example, using techniques well known in the art, cells in a sample may optionally be amplified (e.g., by culturing in an appropriate medium) to increase the sample size, and then may be lysed to release proteins contained therein. This sample may optionally be purified to remove debris and nucleic acid molecules which may interfere with subsequent analysis. Antibodies specific for a selected MCP protein of the invention may be incubated with the protein sample in a typical Western assay format (see, e.g., Ausubel et al., (1988) Current Protocols in Molecular Biology, Wiley: New York) in which the antibody will bind to its target protein if this protein is present in the sample. An MCP protein is selected for this type of assay if it is unique or nearly unique to C. glutamicum or C. glutamicum and bacteria very closely related to C. glutamicum. Proteins in the sample are then separated by gel electrophoresis, and transferred to a suitable matrix, such as nitrocellulose. An appropriate secondary antibody having a detectable label (e.g., chemiluminescent or colorimetric) is incubated with this matrix, followed by stringent washing. The presence or absence of the label is indicative of the presence or absence of the target protein in the sample. If the protein is present, then this is indicative of the presence of C. glutamicum. A similar process enables the classification of an unknown bacterium as C. glutamicum; if a panel of proteins specific to C. glutamicum are not detected in protein samples prepared from the unknown bacterium, then that bacterium is not likely to be C. glutamicum.

[0120] The invention provides methods for screening molecules which modulate the activity of an MCP protein, either by interacting with the protein itself or a substrate or binding partner of the MCP protein, or by modulating the transcription or translation of an MCP nucleic acid molecule of the invention. In such methods, a microorganism expressing one or more MCP proteins of the invention is contacted with one or more test compounds, and the effect of each test compound on the activity or level of expression of the MCP protein is assessed.

[0121] Genetic manipulation of the MCP nucleic acid molecules of the invention may result in the production of MCP proteins having functional differences from the wild-type MCP proteins. These proteins may be improved in efficiency or activity, may be present in greater numbers in the cell than is usual, or may be decreased in efficiency or activity.

[0122] Such changes in activity may directly modulate the yield, production, and/or efficiency of production of one or more fine chemicals from C. glutamicum. For example, by modifying the activity of a protein involved in the biosynthesis or degradation of a fine chemical (i.e., through mutagenesis of the corresponding gene), one may directly modulate the ability of the cell to synthesize or to degrade this compound, thereby modulating the yield and/or efficiency of production of the fine chemical. Similarly, by modulating the activity of a protein which regulates a fine chemical metabolic pathway, one may directly influence whether the production of the desired compound is up- or down-regulated, either of which will modulate the yield or efficiency of production of the fine chemical from the cell.

[0123] Indirect modulation of fine chemical production may also result by modifying the activity of a protein of the invention (i.e., by mutagenesis of the corresponding gene) such that the overall ability of the cell to grow and divide or to remain viable and productive is increased. The production of fine chemicals from C. glutamicum is generally accomplished by the large-scale fermentative culture of these microorganisms, conditions which are frequently suboptimal for growth and cell division. By engineering a protein of the invention (e.g., a stress response protein, a cell wall protein, or proteins involved in the metabolism of compounds necessary for cell growth and division to occur, such as nucleotides and amino acids) such that it is better able to survive, grow, and multiply in such conditions, it may be possible to increase the number and productivity of such engineered C. glutamicum cells in large-scale culture, which in turn should result in increased yields and/or efficiency of production of one or more desired fine chemicals. Further, the metabolic pathways of any cell are necessarily interrelated and coregulated. By altering the activity or regulation of any one metabolic pathway in C. glutamicum (i.e., by altering the activity of one of the proteins of the invention which participates in such a pathway), it is possible to concomitantly alter the activity or regulation of other metabolic pathways in this microorganism, which may be directly involved in the synthesis or degradation of a fine chemical.

[0124] The aforementioned mutagenesis strategies for MCP proteins to result in increased yields of a fine chemical from C. glutamicum are not meant to be limiting; variations on these strategies will be readily apparent to one of ordinary skill in the art. Using such strategies, and incorporating the mechanisms disclosed herein, the nucleic acid and protein molecules of the invention may be utilized to generate C. glutamicum or related strains of bacteria expressing mutated MCP nucleic acid and protein molecules such that the yield, production, and/or efficiency of production of a desired compound is improved. This desired compound may be any natural product of C. glutamicum, which includes the final products of biosynthesis pathways and intermediates of naturally-occurring metabolic pathways, as well as molecules which do not naturally occur in the metabolism of C. glutamicum, but which are produced by a C. glutamicum strain of the invention.

[0125] This invention is further illustrated by the following examples which should not be construed as limiting. The contents of all references, patent applications, patents, published patent applications, Tables, Appendices, and the sequence listing cited throughout this application are hereby incorporated by reference.

### EXEMPLIFICATION

### Example 1

### Preparation of Total Genomic DNA of Corynebacterium glutamicumATCC 13032

[0126] A culture of Corynebacterium glutamicum (ATCC 13032) was grown overnight at 30° C. with vigorous shaking in BHI medium (Difco). The cells were harvested by centrifugation, the supernatant was discarded and the cells were resuspended in 5 ml buffer-I (5% of the original volume of the culture—all indicated volumes have been calculated for 100 ml of culture volume). Composition of buffer-I: 140.34 g/l sucrose, 2.46 g/l MgSO₄×7H₂O, 10 ml/l KH₂PO₄ solution (100 g/l, adjusted to pH 6.7 with KOH), 50 ml/l M12 concentrate (10 g/l (NH₄)₂SO₄, 1 g/l NaCl, 2 g/l MgSO₄×7H₂O, 0.2 g/l CaCl₂, 0.5 g/l yeast extract (Difco), 10 ml/l trace-elements-mix (200 mg/l FeSO₄×H₂O, 10 mg/l ZnSO₄×7H₂O, 3 mg/l MnCl₂×4H₂O; 30 mg/l H₃BO₃ 20 mg/l CoCl₂×6H₂O, 1 mg/l NiCl₂×6H₂O, 3 mg/l Na₂MoO₄×2H₂O, 500 mg/l complexing agent (EDTA or critic acid), 100 ml/l vitamins-mix (0.2 mg/l biotin, 0.2 mg/l folic acid, 20 mg/, p-amino benzoic acid, 20 mg/l riboflavin, 40 mg/l α-panthothenate, 140 mg/l nicotinic acid, 40 mg/l pyridoxole hydrochloride, 200 mg/l myo-inositol). Lysozyme was added to the suspension to a final concentration of 2.5 mg/ml. After an approximately 4 h incubation at 37° C., the cell wall was degraded and the resulting protoplasts are harvested by centrifugation. The pellet was washed once with 5 ml buffer-I and once with 5 ml TE-buffer (10 mM Tris-HCl, 1 mM EDTA, pH 8). The pellet was resuspended in 4 ml TE-buffer and 0.5 ml SDS solution (10%) and 0.5 ml NaCl solution (5 M) are added. After adding of proteinase K to a final concentration of 200 μg/ml, the suspension is incubated for ca. 18 h at 37° C. The DNA was purified by extraction with phenol, phenol-chloroform-isoamylalcohol and chloroform-isoamylalcohol using standard procedures. Then, the DNA was precipitated by adding 1/50 volume of 3 M sodium acetate and 2 volumes of ethanol, followed by a 30 min incubation at −20° C. and a 30 min centrifugation at 12,000 rpm in a high speed centrifuge using a SS34 rotor (Sorvall). The DNA was dissolved in 1 ml TE-buffer containing 20 μg/ml RNaseA and dialysed at 4° C. against 1000 ml TE-buffer for at least 3 hours. During this time, the buffer was exchanged 3 times. To aliquots of 0.4 ml of the dialysed DNA solution, 0.4 ml of 2 M LiCl and 0.8 ml of ethanol are added. After a 30 min incubation at −20° C., the DNA was collected by centrifugation (13,000 rpm, Biofuge Fresco, Heraeus, Hanau, Germany). The DNA pellet was dissolved in TE-buffer. DNA prepared by this procedure could be used for all purposes, including southern blotting or construction of genomic libraries.

### Example 2

### Construction of Genomic Libraries in Escherichia coli of Corynebacterium glutamicum ATCC13032

[0127] Using DNA prepared as described in Example 1, cosmid and plasmid libraries were constructed according to known and well established methods (see e.g., Sambrook, J. et al. (1989) “Molecular Cloning: A Laboratory Manual”, Cold Spring Harbor Laboratory Press, or Ausubel, F. M. et al. (1994) “Current Protocols in Molecular Biology”, John Wiley & Sons.)

[0128] Any plasmid or cosmid could be used. Of particular use were the plasmids pBR322 (Sutcliffe, J. G. (1979) Proc. Natl. Acad. Sci. USA, 75:3737-3741); pACYC177 (Change & Cohen (1978) J. Bacteriol 134:1141-1156), plasmids of the pBS series (pBSSK+, pBSSK−and others; Stratagene, LaJolla, USA), or cosmids as SuperCos1 (Stratagene, LaJolla, USA) or Lorist6 (Gibson, T. J., Rosenthal A. and Waterson, R. H. (1987) Gene 53:283-286. Gene libraries specifically for use in C. glutamicum may be constructed using plasmid pSL109 (Lee, H.-S. and A. J. Sinskey (1994)J. Microbiol. Biotechnol. 4: 256-263).

### Example 3

### DNA Sequencing and Computational Functional Analysis

[0129] Genomic libraries as described in Example 2 were used for DNA sequencing according to standard methods, in particular by the chain termination method using ABI377 sequencing machines (see e.g., Fleischman, R. D. et al. (1995) “Whole-genome Random Sequencing and Assembly of Haemophilus Influenzae Rd., Science, 269:496-512). Sequencing primers with the following nucleotide sequences were used: 5′-GGAAACAGTATGACCATG-3′ or 5′-GTAAAACGACGGCCAGT-3′.

### Example 4

### In vivo Mutagenesis

[0130] In vivo mutagenesis of Corynebacterium glutamicum can be performed by passage of plasmid (or other vector) DNA through E. coli or other microorganisms (e.g. Bacillus spp. or yeasts such as Saccharomyces cerevisiae) which are impaired in their capabilities to maintain the integrity of their genetic information. Typical mutator strains have mutations in the genes for the DNA repair system (e.g., mutHLS, mutD, mutT, etc.; for reference, see Rupp, W. D. (1996) DNA repair mechanisms, in: Escherichia coli and Salmonella, p. 2277-2294, ASM: Washington.) Such strains are well known to those of ordinary skill in the art. The use of such strains is illustrated, for example, in Greener, A. and Callahan, M. (1994) Strategies 7: 32-34.

### Example 5

### DNA Transfer Between Escherichia coli and Corynebacterium glutamicum

[0131] Several Corynebacterium and Brevibacterium species contain endogenous plasmids (as e.g., pHM1519 or pBL1) which replicate autonomously (for review see, e.g., Martin, J. F. et al. (1987) Biotechnology, 5:137-146). Shuttle vectors for Escherichia coli and Corynebacterium glutamicum can be readily constructed by using standard vectors for E. coli (Sambrook, J. et al. (1989), “Molecular Cloning: A Laboratory Manual”, Cold Spring Harbor Laboratory Press or Ausubel, F. M. et al. (1994) “Current Protocols in Molecular Biology”, John Wiley & Sons) to which a origin or replication for and a suitable marker from Corynebacterium glutamicum is added. Such origins of replication are preferably taken from endogenous plasmids isolated from Corynebacterium and Brevibacterium species. Of particular use as transformation markers for these species are genes for kanamycin resistance (such as those derived from the Tn5 or Tn903 transposons) or chloramphenicol (Winnacker, E. L. (1987) “From Genes to Clones-Introduction to Gene Technology, VCH, Weinheim). There are numerous examples in the literature of the construction of a wide variety of shuttle vectors which replicate in both E. coli and C. glutamicum, and which can be used for several purposes, including gene over-expression (for reference, see e.g., Yoshihama, M. et al. (1985)J. Bacteriol. 162:591-597, Martin J. F. et al. (1987) Biotechnology, 5:137-146 and Eikmanns, B. J et al. (1991) Gene, 102:93-98).

[0132] Using standard methods, it is possible to clone a gene of interest into one of the shuttle vectors described above and to introduce such a hybrid vectors into strains of Corynebacterium glutamicum. Transformation of C. glutamicum can be achieved by protoplast transformation (Kastsumata, R. et al. (1984) J. Bacteriol. 159306-311), electroporation (Liebl, E. et al. (1989) FEMS Microbiol. Letters, 53:399-303) and in cases where special vectors are used, also by conjugation (as described e.g. in Schafer, A et al. (1990)J. Bacteriol. 172:1663-1666). It is also possible to transfer the shuttle vectors for C. glutamicum to E. coli by preparing plasmid DNA from C. glutamicum (using standard methods well-known in the art) and transforming it into E. coli. This transformation step can be performed using standard methods, but it is advantageous to use an Mcr-deficient E. coli strain, such as NM522 (Gough & Murray (1983)J. Mol. Biol. 166:1-19).

[0133] Genes may be overexpressed in C. glutamicum strains using plasmids which comprise pCG1 (U.S. Pat. No. 4,617,267) or fragments thereof, and optionally the gene for kanamycin resistance from TN903 (Grindley, N. D. and Joyce, C. M. (1980) Proc. Natl. Acad. Sci. USA 77(12): 7176-7180). In addition, genes may be overexpressed in C. glutamicum strains using plasmid pSL109 (Lee, H.-S. and A. J. Sinskey (1994)J. Microbiol. Biotechnol. 4: 256-263).

[0134] Aside from the use of replicative plasmids, gene overexpression can also be achieved by integration into the genome. Genomic integration in C. glutamicum or other Corynebacterium or Brevibacterium species may be accomplished by well-known methods, such as homologous recombination with genomic region(s), restriction endonuclease mediated integration (REMI) (see, e.g., DE Patent 19823834), or through the use of transposons. It is also possible to modulate the activity of a gene of interest by modifying the regulatory regions (e.g., a promoter, a repressor, and/or an enhancer) by sequence modification, insertion, or deletion using site-directed methods (such as homologous recombination) or methods based on random events (such as transposon mutagenesis or REMI). Nucleic acid sequences which function as transcriptional terminators may also be inserted 3′ to the coding region of one or more genes of the invention; such terminators are well-known in the art and are described, for example, in Winnacker, E. L. (1987) From Genes to Clones—Introduction to Gene Technology. VCH: Weinheim.

### Example 6

### Assessment of the Expression of the Mutant Protein

[0135] Observations of the activity of a mutated protein in a transformed host cell rely on the fact that the mutant protein is expressed in a similar fashion and in a similar quantity to that of the wild-type protein. A useful method to ascertain the level of transcription of the mutant gene (an indicator of the amount of mRNA available for translation to the gene product) is to perform a Northern blot (for reference see, for example, Ausubel et al. (1988) Current Protocols in Molecular Biology, Wiley: New York), in which a primer designed to bind to the gene of interest is labeled with a detectable tag (usually radioactive or chemiluminescent), such that when the total RNA of a culture of the organism is extracted, run on gel, transferred to a stable matrix and incubated with this probe, the binding and quantity of binding of the probe indicates the presence and also the quantity of mRNA for this gene. This information is evidence of the degree of transcription of the mutant gene. Total cellular RNA can be prepared from Corynebacterium glutamicum by several methods, all well-known in the art, such as that described in Bormann, E. R. et al. (1992) Mol. Microbiol. 6: 317-326.

[0136] To assess the presence or relative quantity of protein translated from this mRNA, standard techniques, such as a Western blot, may be employed (see, for example, Ausubel et al. (1988) Current Protocols in Molecular Biology, Wiley: New York). In this process, total cellular proteins are extracted, separated by gel electrophoresis, transferred to a matrix such as nitrocellulose, and incubated with a probe, such as an antibody, which specifically binds to the desired protein. This probe is generally tagged with a chemiluminescent or colorimetric label which may be readily detected. The presence and quantity of label observed indicates the presence and quantity of the desired mutant protein present in the cell.

### Example 7

### Growth of Genetically Modified Corynebacterium glutamicum —Media and Culture Conditions

[0137] Genetically modified Corynebacteria are cultured in synthetic or natural growth media. A number of different growth media for Corynebacteria are both well-known and readily available (Lieb et al. (1989) Appl. Microbiol. Biotechnol., 32:205-210; von der Osten et al. (1998) Biotechnology Letters, 11:11-16; Patent DE 4,120,867; Liebl (1992) “The Genus Corynebacterium, in: The Procaryotes, Volume II, Balows, A. et al., eds. Springer-Verlag). These media consist of one or more carbon sources, nitrogen sources, inorganic salts, vitamins and trace elements. Preferred carbon sources are sugars, such as mono-, di-, or polysaccharides. For example, glucose, fructose, mannose, galactose, ribose, sorbose, ribulose, lactose, maltose, sucrose, raffinose, starch or cellulose serve as very good carbon sources. It is also possible to supply sugar to the media via complex compounds such as molasses or other by-products from sugar refinement. It can also be advantageous to supply mixtures of different carbon sources. Other possible carbon sources are alcohols and organic acids, such as methanol, ethanol, acetic acid or lactic acid. Nitrogen sources are usually organic or inorganic nitrogen compounds, or materials which contain these compounds. Exemplary nitrogen sources include ammonia gas or ammonia salts, such as NH₄Cl or (NH₄)₂SO₄, NH₄OH, nitrates, urea, amino acids or complex nitrogen sources like corn steep liquor, soy bean flour, soy bean protein, yeast extract, meat extract and others.

[0138] Inorganic salt compounds which may be included in the media include the chloride-, phosphorous- or sulfate-salts of calcium, magnesium, sodium, cobalt, molybdenum, potassium, manganese, zinc, copper and iron. Chelating compounds can be added to the medium to keep the metal ions in solution. Particularly useful chelating compounds include dihydroxyphenols, like catechol or protocatechuate, or organic acids, such as citric acid. It is typical for the media to also contain other growth factors, such as vitamins or growth promoters, examples of which include biotin, riboflavin, thiamin, folic acid, nicotinic acid, pantothenate and pyridoxin. Growth factors and salts frequently originate from complex media components such as yeast extract, molasses, corn steep liquor and others. The exact composition of the media compounds depends strongly on the immediate experiment and is individually decided for each specific case. Information about media optimization is available in the textbook “Applied Microbiol. Physiology, A Practical Approach (eds. P. M. Rhodes, P. F. Stanbury, IRL Press (1997) pp. 53-73, ISBN 0 19 963577 3). It is also possible to select growth media from commercial suppliers, like standard 1 (Merck) or BHI (grain heart infusion, DIFCO) or others.

[0139] All medium components are sterilized, either by heat (20 minutes at 1.5 bar and 121° C.) or by sterile filtration. The components can either be sterilized together or, if necessary, separately. All media components can be present at the beginning of growth, or they can optionally be added continuously or batchwise.

[0140] Culture conditions are defined separately for each experiment. The temperature should be in a range between 15° C. and 45° C. The temperature can be kept constant or can be altered during the experiment. The pH of the medium should be in the range of 5 to 8.5, preferably around 7.0, and can be maintained by the addition of buffers to the media. An exemplary buffer for this purpose is a potassium phosphate buffer. Synthetic buffers such as MOPS, HEPES, ACES and others can alternatively or simultaneously be used. It is also possible to maintain a constant culture pH through the addition of NaOH or NH₄OH during growth. If complex medium components such as yeast extract are utilized, the necessity for additional buffers may be reduced, due to the fact that many complex compounds have high buffer capacities. If a fermentor is utilized for culturing the micro-organisms, the pH can also be controlled using gaseous ammonia.

[0141] The incubation time is usually in a range from several hours to several days. This time is selected in order to permit the maximal amount of product to accumulate in the broth. The disclosed growth experiments can be carried out in a variety of vessels, such as microtiter plates, glass tubes, glass flasks or glass or metal fermentors of different sizes. For screening a large number of clones, the microorganisms should be cultured in microtiter plates, glass tubes or shake flasks, either with or without baffles. Preferably 100 ml shake flasks are used, filled with 10% (by volume) of the required growth medium. The flasks should be shaken on a rotary shaker (amplitude 25 mm) using a speed-range of 100-300 rpm. Evaporation losses can be diminished by the maintenance of a humid atmosphere; alternatively, a mathematical correction for evaporation losses should be performed.

[0142] If genetically modified clones are tested, an unmodified control clone or a control clone containing the basic plasmid without any insert should also be tested. The medium is inoculated to an OD₆₀₀ of 0.5-1.5 using cells grown on agar plates, such as CM plates (10 g/l glucose, 2,5 g/l NaCl, 2 g/l urea, 10 g/l polypeptone, 5 g/l yeast extract, 5 g/l meat extract, 22 g/l NaCl, 2 g/l urea, 10 g/l polypeptone, 5 g/l yeast extract, 5 g/l meat extract, 22 g/l agar, pH 6.8 with 2M NaOH) that had been incubated at 30° C. Inoculation of the media is accomplished by either introduction of a saline suspension of C. glutamicum cells from CM plates or addition of a liquid preculture of this bacterium.

### Example 8

### In vitro Analysis of the Function of Mutant Proteins

[0143] The determination of activities and kinetic parameters of enzymes is well established in the art. Experiments to determine the activity of any given altered enzyme must be tailored to the specific activity of the wild-type enzyme, which is well within the ability of one of ordinary skill in the art. Overviews about enzymes in general, as well as specific details concerning structure, kinetics, principles, methods, applications and examples for the determination of many enzyme activities may be found, for example, in the following references: Dixon, M., and Webb, E. C., (1979) Enzymes. Longmans: London; Fersht, (1985) Enzyme Structure and Mechanism. Freeman: New York; Walsh, (1979) Enzymatic Reaction Mechanisms. Freeman: San Francisco; Price, N. C., Stevens, L. (1982) Fundamentals of Enzymology. Oxford Univ. Press: Oxford; Boyer, P. D., ed. (1983) The Enzymes, 3^{rd} ed. Academic Press: New York; Bisswanger, H., (1994) Enzymkinetik, 2^{nd} ed. VCH: Weinheim (ISBN 3527300325); Bergmeyer, H. U., Bergmeyer, J., Graβ1, M., eds. (1983-1986) Methods of Enzymatic Analysis, 3^{rd} ed., vol. I-XII, Verlag Chemie: Weinheim; and Ullmann's Encyclopedia of Industrial Chemistry (1987) vol. A9, “Enzymes”. VCH: Weinheim, p. 352-363.

[0144] The activity of proteins which bind to DNA can be measured by several well-established methods, such as DNA band-shift assays (also called gel retardation assays). The effect of such proteins on the expression of other molecules can be measured using reporter gene assays (such as that described in Kolmar, H. et al. (1995) EMBO J. 14: 3895-3904 and references cited therein). Reporter gene test systems are well known and established for applications in both pro- and eukaryotic cells, using enzymes such as beta-galactosidase, green fluorescent protein, and several others.

[0145] The determination of activity of membrane-transport proteins can be performed according to techniques such as those described in Gennis, R. B. (1989) “Pores, Channels and Transporters”, in Biomembranes, Molecular Structure and Function, Springer: Heidelberg, p. 85-137; 199-234; and 270-322.

### Example 9

### Analysis of Impact of Mutant Protein on the Production of the Desired Product

[0146] The effect of the genetic modification in C. glutamicum on production of a desired compound (such as an amino acid) can be assessed by growing the modified microorganism under suitable conditions (such as those described above) and analyzing the medium and/or the cellular component for increased production of the desired product (i.e., an amino acid). Such analysis techniques are well known to one of ordinary skill in the art, and include spectroscopy, thin layer chromatography, staining methods of various kinds, enzymatic and microbiological methods, and analytical chromatography such as high performance liquid chromatography (see, for example, Ullman, Encyclopedia of Industrial Chemistry, vol. A2, p. 89-90 and p. 443-613, VCH: Weinheim (1985); Fallon, A. et al., (1987) “Applications of HPLC in Biochemistry” in: Laboratory Techniques in Biochemistry and Molecular Biology, vol. 17; Rehm et al. (1993) Biotechnology, vol. 3, Chapter III: “Product recovery and purification”, page 469-714, VCH: Weinheim; Belter, P. A. et al. (1988) Bioseparations: downstream processing for biotechnology, John Wiley and Sons; Kennedy, J. F. and Cabral, J. M. S. (1992) Recovery processes for biological materials, John Wiley and Sons; Shaeiwitz, J. A. and Henry, J. D. (1988) Biochemical separations, in: Ulmann's Encyclopedia of Industrial Chemistry, vol. B3, Chapter 11, page 1-27, VCH: Weinheim; and Dechow, F. J. (1989) Separation and purification techniques in biotechnology, Noyes Publications.)

[0147] In addition to the measurement of the final product of fermentation, it is also possible to analyze other components of the metabolic pathways utilized for the production of the desired compound, such as intermediates and side-products, to determine the overall efficiency of production of the compound. Analysis methods include measurements of nutrient levels in the medium (e.g., sugars, hydrocarbons, nitrogen sources, phosphate, and other ions), measurements of biomass composition and growth, analysis of the production of common metabolites of biosynthetic pathways, and measurement of gasses produced during fermentation. Standard methods for these measurements are outlined in Applied Microbial Physiology, A Practical Approach, P. M. Rhodes and P. F. Stanbury, eds., IRL Press, p. 103-129; 131-163; and 165-192 (ISBN: 0199635773) and references cited therein.

### Example 10

### Purification of the Desired Product from C. glutamicum Culture

[0148] Recovery of the desired product from the C. glutamicum cells or supernatant of the above-described culture can be performed by various methods well known in the art. If the desired product is not secreted from the cells, the cells can be harvested from the culture by low-speed centrifugation, the cells can be lysed by standard techniques, such as mechanical force or sonication. The cellular debris is removed by centrifugation, and the supernatant fraction containing the soluble proteins is retained for further purification of the desired compound. If the product is secreted from the C. glutamicum cells, then the cells are removed from the culture by low-speed centrifugation, and the supernate fraction is retained for further purification.

[0149] The supernatant fraction from either purification method is subjected to chromatography with a suitable resin, in which the desired molecule is either retained on a chromatography resin while many of the impurities in the sample are not, or where the impurities are retained by the resin while the sample is not. Such chromatography steps may be repeated as necessary, using the same or different chromatography resins. One of ordinary skill in the art would be well-versed in the selection of appropriate chromatography resins and in their most efficacious application for a particular molecule to be purified. The purified product may be concentrated by filtration or ultrafiltration, and stored at a temperature at which the stability of the product is maximized.

[0150] There are a wide array of purification methods known to the art and the preceding method of purification is not meant to be limiting. Such purification techniques are described, for example, in Bailey, J. E. & Ollis, D. F. Biochemical Engineering Fundamentals, McGraw-Hill: New York (1986).

[0151] The identity and purity of the isolated compounds may be assessed by techniques standard in the art. These include high-performance liquid chromatography (HPLC), spectroscopic methods, staining methods, thin layer chromatography, NIRS, enzymatic assay, or microbiologically. Such analysis methods are reviewed in: Patek et al. (1994) Appl. Environ. Microbiol. 60: 133-140; Malakhova et al. (1996) Biotekhnologiya 11: 27-32; and Schmidt et al. (1998) Bioprocess Engineer. 19: 67-70. Ulmann's Encyclopedia of Industrial Chemistry, (1996) vol. A27, VCH: Weinheim, p. 89-90, p. 521-540, p. 540-547, p. 559-566, 575-581 and p. 581-587; Michal, G. (1999) Biochemical Pathways: An Atlas of Biochemistry and Molecular Biology, John Wiley and Sons; Fallon, A. et al. (1987) Applications of HPLC in Biochemistry in: Laboratory Techniques in Biochemistry and Molecular Biology, vol. 17.

### Example 11

### Analysis of the Gene Sequences of the Invention

[0152] The comparison of sequences and determination of percent homology between two sequences are art-known techniques, and can be accomplished using a mathematical algorithm, such as the algorithm of Karlin and Altschul (1990) Proc. Natl. Acad. Sci. USA 87:2264-68, modified as in Karlin and Altschul (1993) Proc. Natl. Acad. Sci. USA 90:5873-77. Such an algorithm is incorporated into the NBLAST and XBLAST programs (version 2.0) of Altschul, et al. (1990) J. Mol. Biol. 215:403-10. BLAST nucleotide searches can be performed with the NBLAST program, score=100, wordlength=12 to obtain nucleotide sequences homologous to MCP nucleic acid molecules of the invention. BLAST protein searches can be performed with the XBLAST program, score=50, wordlength=3 to obtain amino acid sequences homologous to MCP protein molecules of the invention. To obtain gapped alignments for comparison purposes, Gapped BLAST can be utilized as described in Altschul et al., (1997) Nucleic Acids Res. 25(17):3389-3402. When utilizing BLAST and Gapped BLAST programs, one of ordinary skill in the art will know how to optimize the parameters of the program (e.g., XBLAST and NBLAST) for the specific sequence being analyzed.

[0153] Another example of a mathematical algorithm utilized for the comparison of sequences is the algorithm of Meyers and Miller ((1988) Comput. Appl. Biosci. 4: 11-17). Such an algorithm is incorporated into the ALIGN program (version 2.0) which is part of the GCG sequence alignment software package. When utilizing the ALIGN program for comparing amino acid sequences, a PAM 120 weight residue table, a gap length penalty of 12, and a gap penalty of 4 can be used. Additional algorithms for sequence analysis are known in the art, and include ADVANCE and ADAM. described in Torelli and Robotti (1994) Comput. Appl. Biosci. 10:3-5; and FASTA, described in Pearson and Lipman (1988) P.N.A.S. 85:2444-8.

[0154] The percent homology between two amino acid sequences can also be accomplished using the GAP program in the GCG software package (available at http://www.gcg.com), using either a Blosum 62 matrix or a PAM250 matrix, and a gap weight of 12, 10, 8, 6, or 4 and a length weight of 2, 3, or 4. The percent homology between two nucleic acid sequences can be accomplished using the GAP program in the GCG software package, using standard parameters, such as a gap weight of 50 and a length weight of 3.

[0155] A comparative analysis of the gene sequences of the invention with those present in Genbank has been performed using techniques known in the art (see, e.g., Bexevanis and Ouellette, eds. (1998) Bioinformatics: A Practical Guide to the Analysis of Genes and Proteins. John Wiley and Sons: New York). The gene sequences of the invention were compared to genes present in Genbank in a three-step process. In a first step, a BLASTN analysis (e.g., a local alignment analysis) was performed for each of the sequences of the invention against the nucleotide sequences present in Genbank, and the top 500 hits were retained for further analysis. A subsequent FASTA search (e.g., a combined local and global alignment analysis, in which limited regions of the sequences are aligned) was performed on these 500 hits. Each gene sequence of the invention was subsequently globally aligned to each of the top three FASTA hits, using the GAP program in the GCG software package (using standard parameters). In order to obtain correct results, the length of the sequences extracted from Genbank were adjusted to the length of the query sequences by methods well-known in the art. The results of this analysis are set forth in Table 4. The resulting data is identical to that which would have been obtained had a GAP (global) analysis alone been performed on each of the genes of the invention in comparison with each of the references in Genbank, but required significantly reduced computational time as compared to such a database-wide GAP (global) analysis. Sequences of the invention for which no alignments above the cutoff values were obtained are indicated on Table 4 by the absence of alignment information. It will further be understood by one of ordinary skill in the art that the GAP alignment homology percentages set forth in Table 4 under the heading “% homology (GAP)” are listed in the European numerical format, wherein a ‘,’ represents a decimal point. For example, a value of “40,345” in this column represents “40.345%”.

### Example 12

### Construction and Operation of DNA Microarrays

[0156] The sequences of the invention may additionally be used in the construction and application of DNA microarrays (the design, methodology, and uses of DNA arrays are well known in the art, and are described, for example, in Schena, M. et al. (1995) Science 270: 467-470; Wodicka, L. et al. (1997) Nature Biotechnology 15: 1359-1367; DeSaizieu, A. et al. (1998) Nature Biotechnology 16: 45-48; and DeRisi, J. L. et al. (1997) Science 278: 680-686).

[0157] DNA microarrays are solid or flexible supports consisting of nitrocellulose, nylon, glass, silicone, or other materials. Nucleic acid molecules may be attached to the surface in an ordered manner. After appropriate labeling, other nucleic acids or nucleic acid mixtures can be hybridized to the immobilized nucleic acid molecules, and the label may be used to monitor and measure the individual signal intensities of the hybridized molecules at defined regions. This methodology allows the simultaneous quantification of the relative or absolute amount of all or selected nucleic acids in the applied nucleic acid sample or mixture. DNA microarrays, therefore, permit an analysis of the expression of multiple (as many as 6800 or more) nucleic acids in parallel (see, e.g., Schena, M. (1996) BioEssays 18(5): 427-431).

[0158] The sequences of the invention may be used to design oligonucleotide primers which are able to amplify defined regions of one or more C. glutamicum genes by a nucleic acid amplification reaction such as the polymerase chain reaction. The choice and design of the 5′ or 3′ oligonucleotide primers or of appropriate linkers allows the covalent attachment of the resulting PCR products to the surface of a support medium described above (and also described, for example, Schena, M. et al. (1995) Science 270: 467-470).

[0159] Nucleic acid microarrays may also be constructed by in situ oligonucleotide synthesis as described by Wodicka, L. et al. (1997) Nature Biotechnology 15: 1359-1367. By photolithographic methods, precisely defined regions of the matrix are exposed to light. Protective groups which are photolabile are thereby activated and undergo nucleotide addition, whereas regions that are masked from light do not undergo any modification. Subsequent cycles of protection and light activation permit the synthesis of different oligonucleotides at defined positions. Small, defined regions of the genes of the invention may be synthesized on microarrays by solid phase oligonucleotide synthesis.

[0160] The nucleic acid molecules of the invention present in a sample or mixture of nucleotides may be hybridized to the microarrays. These nucleic acid molecules can be labeled according to standard methods. In brief, nucleic acid molecules (e.g., mRNA molecules or DNA molecules) are labeled by the incorporation of isotopically or fluorescently labeled nucleotides, e.g., during reverse transcription or DNA synthesis. Hybridization of labeled nucleic acids to microarrays is described (e.g., in Schena, M. et al. (1995) supra; Wodicka, L. et al. (1997), supra; and DeSaizieu A. et al. (1998), supra). The detection and quantification of the hybridized molecule are tailored to the specific incorporated label. Radioactive labels can be detected, for example, as described in Schena, M. et al. (1995) supra) and fluorescent labels may be detected, for example, by the method of Shalon et al. (1996) Genome Research 6: 639-645).

[0161] The application of the sequences of the invention to DNA microarray technology, as described above, permits comparative analyses of different strains of C. glutamicum or other Corynebacteria. For example, studies of inter-strain variations based on individual transcript profiles and the identification of genes that are important for specific and/or desired strain properties such as pathogenicity, productivity and stress tolerance are facilitated by nucleic acid array methodologies. Also, comparisons of the profile of expression of genes of the invention during the course of a fermentation reaction are possible using nucleic acid array technology.

### Example 13

### Analysis of the Dynamics of Cellular Protein Populations (Proteomics)

[0162] The genes, compositions, and methods of the invention may be applied to study the interactions and dynamics of populations of proteins, termed ‘proteomics’. Protein populations of interest include, but are not limited to, the total protein population of C. glutamicum (e.g., in comparison with the protein populations of other organisms), those proteins which are active under specific environmental or metabolic conditions (e.g., during fermentation, at high or low temperature, or at high or low pH), or those proteins which are active during specific phases of growth and development.

[0163] Protein populations can be analyzed by various well-known techniques, such as gel electrophoresis. Cellular proteins may be obtained, for example, by lysis or extraction, and may be separated from one another using a variety of electrophoretic techniques. Sodium dodecyl sulfate polyacrylamide gel electrophoresis (SDS-PAGE) separates proteins largely on the basis of their molecular weight. Isoelectric focusing polyacrylamide gel electrophoresis (IEF-PAGE) separates proteins by their isoelectric point (which reflects not only the amino acid sequence but also posttranslational modifications of the protein). Another, more preferred method of protein analysis is the consecutive combination of both IEF-PAGE and SDS-PAGE, known as 2-D-gel electrophoresis (described, for example, in Hermann et al. (1998) Electrophoresis 19: 3217-3221; Fountoulakis et al. (1998) Electrophoresis 19: 1193-1202; Langen et al. (1997) Electrophoresis 18: 1184-1192; Antelmann et al. (1997) Electrophoresis 18: 1451-1463). Other separation techniques may also be utilized for protein separation, such as capillary gel electrophoresis; such techniques are well known in the art.

[0164] Proteins separated by these methodologies can be visualized by standard techniques, such as by staining or labeling. Suitable stains are known in the art, and include Coomassie Brilliant Blue, silver stain, or fluorescent dyes such as Sypro Ruby (Molecular Probes). The inclusion of radioactively labeled amino acids or other protein precursors (e.g., ³⁵S-methionine, ³⁵S-cysteine, ¹⁴C-labelled amino acids, ¹⁵N-amino acids, ¹⁵NO₃ or ¹⁵NH₄⁺ or ¹³C-labelled amino acids) in the medium of C. glutamicum permits the labeling of proteins from these cells prior to their separation. Similarly, fluorescent labels may be employed. These labeled proteins can be extracted, isolated and separated according to the previously described techniques.

[0165] Proteins visualized by these techniques can be further analyzed by measuring the amount of dye or label used. The amount of a given protein can be determined quantitatively using, for example, optical methods and can be compared to the amount of other proteins in the same gel or in other gels. Comparisons of proteins on gels can be made, for example, by optical comparison, by spectroscopy, by image scanning and analysis of gels, or through the use of photographic films and screens. Such techniques are well-known in the art.

[0166] To determine the identity of any given protein, direct sequencing or other standard techniques may be employed. For example, N- and/or C-terminal amino acid sequencing (such as Edman degradation) may be used, as may mass spectrometry (in particular MALDI or ESI techniques (see, e.g., Langen et al. (1997) Electrophoresis 18: 1184-1192)). The protein sequences provided herein can be used for the identification of C. glutamicum proteins by these techniques.

[0167] The information obtained by these methods can be used to compare patterns of protein presence, activity, or modification between different samples from various biological conditions (e.g., different organisms, time points of fermentation, media conditions, or different biotopes, among others). Data obtained from such experiments alone, or in combination with other techniques, can be used for various applications, such as to compare the behavior of various organisms in a given (e.g., metabolic) situation, to increase the productivity of strains which produce fine chemicals or to increase the efficiency of the production of fine chemicals.

### EQUIVALENTS

[0168] Those of ordinary skill in the art will recognize, or will be able to ascertain using no more than routine experimentation, many equivalents to the specific embodiments of the invention described herein. Such equivalents are intended to be encompassed by the following claims.

ALIGNMENT RESULTS

| | | | | | | | % | |
|---|---|---|---|---|---|---|---|---|
| | length | | | | | | homology | |
| ID # | (NT) | Genbank Hit | Length | Accession | Name of Genbank Hit | Source of Genbank Hit | (GAP) | Date of Deposit |
| rxa00003 | 864 | GB_BA2: MPAE000013 | 10328 | AE000013 | Mycoplasma pneumoniae section 13 of 63 of the complete genome. | Mycoplasma pneumoniae | 37,409 | 18-Nov-96 |
| rxa00003 | 864 | GB_BA2: MPAE000013 | 10328 | AE000013 | Mycoplasma pneumoniae section 13 of 63 of the complete genome. | Mycoplasma pneumoniae | 37,409 | 18-Nov-96 |
| | | GB_BA2: MPAE000013 | 10328 | AE000013 | Mycoplasma pneumoniae section 13 of 63 of the complete genome. | Mycoplasma pneumoniae | 36,768 | 18-Nov-96 |
| rxa00008 | 615 | GB_HTG2: AC007356 | 185382 | AC007356 | Drosophila melanogaster chromosome 2 clone BACR24H09 (D595) RPCI-98 | Drosophila melanogaster | 39,203 | 2-Aug-99 |
| | | | | | 24.H.9 map 49A-49B strain y; cn bw sp, *** SEQUENCING IN PROGRESS ***, | | | |
| | | | | | 13 unordered pieces. | | | |
| | | GB_HTG2: AC007356 | 185382 | AC007356 | Drosophila melanogaster chromosome 2 clone BACR24H09 (D595) RPCI-98 24.H.9 | Drosophila melanogaster | 39,203 | 2-Aug-99 |
| | | | | | map 49A-49B strain y; cn bw sp, *** SEQUENCING IN PROGRESS***, | | | |
| | | | | | 13 unordered pieces. | | | |
| | | GB_EST36: AV194293 | 380 | AV194293 | AV194293 Yuji Kohara unpublished cDNA: Strain N2 hermaphrodite embryo | Caenorhabditis elegans | 38,947 | 22-Jul-99 |
| | | | | | Caenorhabditis elegans cDNA clone yk627f12 5′, mRNA sequence. | | | |
| rxa00015 | 432 | GB_GSS4: AQ684785 | 671 | AQ684785 | HS_5481_B2_H06_SP6E RPCI-11 Human Male BAC Library Homo sapiens | Homo sapiens | 41,388 | 28-Jun-99 |
| | | | | | genomic clone Plate = 1057 Col = 12 Row = P, genomic survey sequence. | | | |
| | | GB_PR2: HS217O16 | 87552 | AL031771 | Human DNA sequence from clone 217O16 on chromosome 6q24 | Homo sapiens | 37,471 | 23-Nov-99 |
| | | | | | Contains GSS, complete sequence. | | | |
| | | GB_EST15: AA528550 | 335 | AA528550 | nf01f01.s1 NCI_CGAP_Kid1 Homo sapiens cDNA clone IMAGE: | Homo sapiens | 40,789 | 19-Aug-97 |
| | | | | | 912505, mRNA sequence. | | | |
| rxa00018 | 1422 | GB_VI: HS5MCP | 4320 | M25411 | Human cytomegalovirus major capsid protein (MCP) gene, complete cds. | human herpesvirus 5 | 38,231 | 30-OCT-1994 |
| | | GB_BA2: AE001270 | 12448 | AE001270 | Treponema pallidum section 86 of 87 of the complete genome. | Treponema pallidum | 37,130 | 16-Jul-98 |
| | | GB_IN1: LMFL2385 | 22004 | AL034389 | Leishmania major Friedlin cosmid L2385, complete sequence. | Leishmania major | 37,518 | 15-MAR-1999 |
| rxa00020 | 903 | GB_PR4: AC006960 | 179757 | AC006960 | Homo sapiens clone UWGC: djs58 from 7p14-15, complete sequence. | Homo sapiens | 36,618 | 05-MAR-1999 |
| | | GB_HTG3: AC008266 | 178972 | AC008266 | Homo sapiens clone DJ1145A24, *** SEQUENCING IN PROGRESS ***, | Homo sapiens | 35,419 | 21-Aug-99 |
| | | | | | 3 unordered pieces. | | | |
| | | GB_HTG3: AC008266 | 178972 | AC008266 | Homo sapiens clone DJ1145A24, *** SEQUENCING IN PROGRESS ***, | Homo sapiens | 35,419 | 21-Aug-99 |
| | | | | | 3 unordered pieces. | | | |
| rxa00021 | 1896 | GB_EST15: AA496164 | 429 | AA496164 | zu67e09.r1 Soares_testis_NHT Homo sapiens cDNA clone IMAGE: 743080 5′, | Homo sapiens | 35,526 | 11-Aug-97 |
| | | | | | mRNA sequence. | | | |
| | | GB_EST30: AI660039 | 443 | AI660039 | we65d06.x1 Soares_thymus_NHFTh Homo sapiens cDNA clone IMAGE: 2345963 | Homo sapiens | 42,574 | 10-MAY-1999 |
| | | | | | 3′, mRNA sequence. | | | |
| | | GB_EST37: AI953059 | 522 | AI953059 | wq49g06.x1 NCI_CGAP_GC6 Homo sapiens cDNA clone IMAGE: 2474650 | Homo sapiens | 39,198 | 6-Sep-99 |
| | | | | | 3′, mRNA sequence. | | | |
| rxa00022 | 1824 | GB_EST15: AA496164 | 429 | AA496164 | zu67e09.r1 Soares_testis_NHT Homo sapiens cDNA clone IMAGE: 743080 5′, | Homo sapiens | 41,141 | 11-Aug-97 |
| | | | | | mRNA sequence. | | | |
| | | GB_PR3: AF022141 | 43473 | AF022141 | Homo sapiens chromosome 21q22.2 cosmid Q13F10, complete sequence. | Homo sapiens | 37,262 | 21-Jan-98 |
| | | GB_EST18: AA678649 | 538 | AA678649 | ah07c05.s1 Gessler Wilms tumor Homo sapiens cDNA clone IMAGE: 1155944 3′ | Homo sapiens | 38,104 | 02-DEC-1997 |
| | | | | | similar to gb: X16869 ELONGATION FACTOR 1-ALPHA 1 (HUMAN);, | | | |
| | | | | | mRNA sequence. | | | |
| rxa00025 | 1560 | GB_PL2: AC009978 | 97554 | AC009978 | Genomic sequence for Arabidopsis thaliana BAC T23E18 from chromosome I, | Arabidopsis thaliana | 34,173 | 15-Nov-99 |
| | | | | | complete sequence. | | | |
| | | GB_HTG2: AC005958 | 216706 | AC005958 | Homo sapiens, *** SEQUENCING IN PROGRESS ***, 40 unordered pieces. | Homo sapiens | 35,374 | 11-Nov-98 |
| | | GB_HTG2: AC005958 | 216706 | AC005958 | Homo sapiens, *** SEQUENCING IN PROGRESS ***, 40 unordered pieces. | Homo sapiens | 35,374 | 11-Nov-98 |
| rxa00027 | 489 | GB_PR3: HSDJ247C2 | 98358 | AL049713 | Human DNA sequence from clone 247C2 on chromosome 11p13, complete sequence. | Homo sapiens | 33,056 | 23-Nov-99 |
| | | GB_PR3: HSDJ247C2 | 98358 | AL049713 | Human DNA sequence from clone 247C2 on chromosome 11p13, complete sequence. | Homo sapiens | 37,988 | 23-Nov-99 |
| rxa00028 | | | | | | | | |
| rxa00031 | 525 | GB_PL1: SPBC725 | 37949 | AL034352 | S. pombe chromosome II cosmid c725. | Schizosaccharomyces | 36,084 | 29-MAR-1999 |
| | | | | | | pombe | | |
| | | GB_EST5: N22565 | 435 | N22565 | yw30f05.s1 Morton Fetal Cochlea Homo sapiens cDNA clone IMAGE: 253761 3′, | Homo sapiens | 41,570 | 20-DEC-1995 |
| | | | | | mRNA sequence. | | | |
| | | GB_EST21: AA993042 | 464 | AA993042 | ot92f07.s1 Soares_total_fetus_Nb2HF8_9w Homo sapiens cDNA clone IMAGE: | Homo sapiens | 41,499 | 27-Aug-98 |
| | | | | | 1624261 3′, mRNA sequence. | | | |
| rxa00049 | 810 | GB_HTG2: HSJ749H19 | 253387 | AL117380 | Homo sapiens chromosome 20 clone RP4-749H19 map q13.11-13.33, | Homo sapiens | 37,132 | 03-DEC-1999 |
| | | | | | *** SEQUENCING IN PROGRESS ***, in unordered pieces. | | | |
| | | GB_HTG2: HSJ749H19 | 253387 | AL117380 | Homo sapiens chromosome 20 clone RP4-749H19 map q13.11-13.33, | Homo sapiens | 37,132 | 03-DEC-1999 |
| | | | | | *** SEQUENCING IN PROGRESS ***, in unordered pieces. | | | |
| | | GB_HTG4: AC010137 | 155817 | AC010137 | Homo sapiens clone NH0169D01, *** SEQUENCING IN PROGRESS ***, | Homo sapiens | 40,052 | 17-OCT-1999 |
| | | | | | 4 unordered pieces. | | | |
| rxa00052 | 834 | GB_EST37: AI962012 | 382 | AI962012 | wt41e06.x1 NCI_CGAP_Pan1 Homo sapiens cDNA clone IMAGE: 2510050 | Homo sapiens | 40,486 | 20-Aug-99 |
| | | | | | 3′ similar to SW: ALC2_HUMAN P01877 IG ALPHA-2 CHAIN C REGION.;, | | | |
| | | | | | mRNA sequence. | | | |
| | | GB_GSS13: AQ454792 | 450 | AQ454792 | HS_5195_B2_H04_SP6E RPCI-11 Human Male BAC Library Homo sapiens | Homo sapiens | 40,991 | 21-Apr-99 |
| | | | | | genomic clone Plate = 771 Col = 8 Row = P, genomic survey sequence. | | | |
| | | GB_GSS13: AQ454792 | 450 | AQ454792 | HS_5195_B2_H04_SP6E RPCI-11 Human Male BAC Library Homo sapiens | Homo sapiens | 40,278 | 21-Apr-99 |
| | | | | | genomic clone Plate = 771 Col = 8 Row = P, genomic survey sequence. | | | |
| rxa00054 | 3036 | GB_GSS5: AQ773786 | 459 | AQ773786 | HS_2222_A1_E07_MR CIT Approved Human Genomic Sperm Library D | Homo sapiens | 40,087 | 29-Jul-99 |
| | | | | | Homo sapiens genomic clone Plate = 2222 Col = 13 Row = I, | | | |
| | | | | | genomic survey sequence. | | | |
| | | GB_GSS5: AQ773786 | 459 | AQ773786 | HS_2222_A1_E07_MR CIT Approved Human Genomic Sperm Library D | Homo sapiens | 40,087 | 29-Jul-99 |
| | | | | | Homo sapiens genomic clone Plate = 2222 Col = 13 Row = I, | | | |
| | | | | | genomic survey sequence. | | | |
| rxa00056 | 873 | GB_IN1: CEF56H9 | 28291 | Z74473 | Caenorhabditis elegans cosmid F56H9, complete sequence. | Caenorhabditis elegans | 35,301 | 23-Nov-98 |
| | | GB_IN1: CEF56H9 | 28291 | Z74473 | Caenorhabditis elegans cosmid F56H9, complete sequence. | Caenorhabditis elegans | 38,941 | 23-Nov-98 |
| rxa00058 | 687 | GB_HTG6: AC011647 | 141830 | AC011647 | Homo sapiens clone RP11-15D18, *** SEQUENCING IN PROGRESS ***, | Homo sapiens | 39,939 | 04-DEC-1999 |
| | | | | | 29 unordered pieces. | | | |
| | | GB_HTG6: AC011647 | 141830 | AC011647 | Homo sapiens clone RP11-15D18, *** SEQUENCING IN PROGRESS ***, | Homo sapiens | 37,537 | 04-DEC-1999 |
| | | | | | 29 unordered pieces. | | | |
| rxa00059 | 405 | GB_GSS6: AQ825754 | 463 | AQ825754 | HS_5441_A2_G02_SP6E RPCI-11 Human Male BAC Library | Homo sapiens | 34,444 | 27-Aug-99 |
| | | | | | Homo sapiens genomic clone Plate = 1017 Col = 4 Row = M, | | | |
| | | | | | genomic survey sequence. | | | |
| | | GB_PAT: I32939 | 30001 | I32939 | Sequence 1 from patent U.S. Pat. No. 5589385. | Unknown. | 42,049 | 6-Feb-97 |
| | | GB_PAT: AR031772 | 30001 | AR031772 | Sequence 1 from patent U.S. Pat. No. 5866410. | Unknown. | 42,049 | 29-Sep-99 |
| rxa00065 | 396 | GB_PAT: E16763 | 2517 | E16763 | gDNA encoding aspartate transferase (AAT). | Corynebacterium | 98,765 | 28-Jul-99 |
| | | | | | | glutamicum | | |
| | | GB_EST32: AU050556 | 813 | AU050556 | AU050556 Paralichthys olivaceus library (Aoki T) Paralichthys olivaceus cDNA | Paralichthys olivaceus | 35,638 | 8-Jun-99 |
| | | | | | clone WF7-19, mRNA sequence. | | | |
| | | GB_EST32: AU050215 | 733 | AU050215 | AU050215 Paralichthys olivaceus library (Aoki T) Paralichthys olivaceus cDNA | Paralichthys olivaceus | 35,638 | 8-Jun-99 |
| | | | | | clone WB1-12, mRNA sequence. | | | |
| rxa00067 | 609 | GB_HTG3: AC008289 | 115120 | AC008289 | Drosophila melanogaster chromosome 2 clone BACR04E05(D1055) RPCI-98 04.E.5 | Drosophila melanogaster | 30,397 | 17-Aug-99 |
| | | | | | map 57B-57B strain y; cn bw sp, *** SEQUENCING IN PROGRESS ***, | | | |
| | | | | | 100 unordered pieces. | | | |
| | | GB_IN2: AC004433 | 85862 | AC004433 | Drosophila melanogaster, chromosome 2R, region 57B1-57B6, P1 clone | Drosophila melanogaster | 35,501 | 01-DEC-1998 |
| | | | | | DS03659, complete sequence. | | | |
| | | GB_HTG3: AC008289 | 115120 | AC008289 | Drosophila melanogaster chromosome 2 clone BACR04E05 (D1055) RPCI-98 04.E.5 | Drosophila melanogaster | 30,397 | 17-Aug-99 |
| | | | | | map 57B-57B strain y; cn bw sp, *** SEQUENCING IN PROGRESS ***, | | | |
| | | | | | 100 unordered pieces. | | | |
| rxa00068 | 705 | GB_PL2: ATAC006201 | 87947 | AC006201 | Arabidopsis thaliana chromosome II BAC T27K22 genomic sequence, | Arabidopsis thaliana | 39,099 | 12-MAR-1999 |
| | | | | | complete sequence. | | | |
| | | GB_HTG5: AC010146 | 271437 | AC010146 | Homo sapiens clone NH0355I13, WORKING DRAFT SEQUENCE, | Homo sapiens | 34,237 | 12-Nov-99 |
| | | | | | 1 unordered pieces. | | | |
| | | GB_GSS3: B85079 | 307 | B85079 | RPCI11-29O9.TP RPCI-11 Homo sapiens genomic clone | Homo sapiens | 39,560 | 9-Apr-99 |
| | | | | | RPCI-11-29O9, genomic survey sequence. | | | |
| rxa00077 | 1485 | GB_PR4: AC007157 | 152937 | AC007157 | Homo sapiens, clone hRPK.78_A_1, complete sequence. | Homo sapiens | 37,661 | 27-Apr-99 |
| | | GB_HTG1: CEY43C5 | 149571 | AL021449 | Caenorhabditis elegans chromosome IV clone Y43C5, *** SEQUENCING | Caenorhabditis elegans | 25,242 | 23-Jan-98 |
| | | | | | IN PROGRESS ***, in unordered pieces. | | | |
| | | GB_HTG1: CEY43C5 | 149571 | AL021449 | Caenorhabditis elegans chromosome IV clone Y43C5, *** SEQUENCING | Caenorhabditis elegans | 38,258 | 23-Jan-98 |
| | | | | | IN PROGRESS ***, in unordered pieces. | | | |
| rxa00079 | 345 | GB_IN1: CTAJ2763 | 1097 | AJ002763 | Chironomus tentans mRNA for P23 protein (23 kDa). | Chironomus tentans | 36,176 | 26-Jan-98 |
| | | GB_IN1: CTHRP23 | 752 | AJ003820 | Chironomus tentans mRNA for hnRNP protein, hrp23. | Chironomus tentans | 36,176 | 02-DEC-1998 |
| | | GB_EST17: AA650674 | 540 | AA650674 | 30788 Lambda-PRL2 Arabidopsis thaliana cDNA clone 277G7T7, mRNA sequence. | Arabidopsis thaliana | 36,965 | 31-OCT-1997 |
| rxa00080 | 1653 | GB_EST38: AW039986 | 564 | AW039986 | EST282477 tomato mixed elicitor, BTI Lycopersicon esculentum cDNA clone | Lycopersicon esculentum | 38,078 | 18-OCT-1999 |
| | | | | | cLET19F23, mRNA sequence. | | | |
| | | GB_EST33: AI778332 | 378 | AI778332 | EST259211 tomato susceptible, Cornell Lycopersicon esculentum cDNA clone | Lycopersicon esculentum | 38,298 | 29-Jun-99 |
| | | | | | cLES5A13, mRNA sequence. | | | |
| | | GB_EST38: AW039988 | 564 | AW039988 | EST282479 tomato mixed elicitor, BTI Lycopersicon esculentum cDNA clone | Lycopersicon esculentum | 38,078 | 18-OCT-1999 |
| | | | | | cLET19F23, mRNA sequence. | | | |
| rxa00082 | 687 | GB_PR1: HSS171 | 333303 | AJ011930 | Homo sapiens chromosome 21q22.3, PAC clones 314N7, 225L15, | Homo sapiens | 36,111 | 10-Nov-98 |
| | | | | | BAC clone 7B7, complete sequence bases 1. .333303. | | | |
| | | GB_PR1: HSS171 | 333303 | AJ011930 | Homo sapiens chromosome 21q22.3, PAC clones 314N7, 225L15, BAC | Homo sapiens | 35,432 | 10-Nov-98 |
| | | | | | clone 7B7, complete sequence bases 1. .333303. | | | |
| | | GB_PR3: AC004000 | 128117 | AC004000 | Human PAC clone DJ404F18 from Xq23, complete sequence. | Homo sapiens | 38,750 | 15-Jan-98 |
| rxa00083 | 423 | GB_HTG1: CNS018OY | 168868 | AL109769 | Homo sapiens chromosome 14 clone R-501E21, *** SEQUENCING | Homo sapiens | 33,806 | 15-OCT-1999 |
| | | | | | IN PROGRESS ***, in ordered pieces. | | | |
| | | GB_HTG1: CNS018OY | 168868 | AL109769 | Homo sapiens chromosome 14 clone R-501E21, *** SEQUENCING | Homo sapiens | 33,806 | 15-OCT-1999 |
| | | | | | IN PROGRESS ***, in ordered pieces. | | | |
| | | GB_PR3: HS516C23 | 116685 | Z93021 | Human DNA sequence from clone 516C23 on chromosome 6q12 Contains CA | Homo sapiens | 36,562 | 23-Nov-99 |
| | | | | | repeat (D6S402) and GSSs, complete sequence. | | | |
| rxa00087 | 651 | GB_BA1: PSEBPHABC | 6780 | M83673 | P. pseudoalcaligenes dioxygenase (bphABC) gene cluster, complete cds. | Pseudomonas | 39,564 | 26-Apr-93 |
| | | | | | | pseudoalcaligenes | | |
| | | GB_BA1: PSEBPHA | 5700 | M86348 | Pseudomonas sp. LB400 biphenyl dioxygenase (bphA), biphenyl dioxygenase | Burkholderia sp. LB400 | 39,564 | 18-Jul-97 |
| | | | | | (bphE), biphenyl dioxygenase (bphF) and biphenyl dioxygenase (bphG)s, | | | |
| | | | | | complete cds, and dihydrodiol dehydrogenase (bphB), partial cds. | | | |
| | | GB_PAT: E04215 | 4721 | E04215 | Benzene dioxygenase gene. | Pseudomonas aeruginosa | 45,814 | 29-Sep-97 |
| rxa00093 | 2346 | GB_HTG2: AC007361 | 36465 | AC007361 | Homo sapiens clone NH0144P23, *** SEQUENCING IN PROGRESS ***, | Homo sapiens | 37,179 | 23-Apr-99 |
| | | | | | 1 unordered pieces. | | | |
| | | GB_PR4: AC006043 | 189036 | AC006043 | Homo sapiens BAC clone NH0538D15 from 7q11.23-q21.1, complete sequence. | Homo sapiens | 37,060 | 20-Feb-99 |
| | | GB_HTG2: AC007361 | 36465 | AC007361 | Homo sapiens clone NH0144P23, *** SEQUENCING IN PROGRESS ***, | Homo sapiens | 37,179 | 23-Apr-99 |
| | | | | | 1 unordered pieces. | | | |
| rxa00096 | 426 | GB_EST15: AA533064 | 534 | AA533064 | nj60d06.s1 NCI_CGAP_Pr9 Homo sapiens cDNA clone IMAGE: | Homo sapiens | 39,024 | 21-Aug-97 |
| | | | | | 996875, mRNA sequence. | | | |
| | | GB_IN1: CELF01G12 | 34671 | U53342 | Caenorhabditis elegans cosmid F01G12. | Caenorhabditis elegans | 38,060 | 5-Apr-96 |
| | | GB_PR3: AC004511 | 45005 | AC004511 | Homo sapiens chromosome 5, P1 clone 792C12 (LBNL H22), complete sequence. | Homo sapiens | 39,163 | 31-MAR-1998 |
| rxa00097 | 1299 | GB_OM: CFU60590 | 6726 | U60590 | Canis familiaris TTX-resistant sodium channel mRNA, complete cds. | Canis familiaris | 39,528 | 8-Jan-98 |
| | | GB_GSS15: AQ664394 | 485 | AQ664394 | HS_5480_B1_B02_SP6E RPCI-11 Human Male BAC Library | Homo sapiens | 39,666 | 23-Jun-99 |
| | | | | | Homo sapiens genomic clone Plate = 1056 Col = 3 Row = D, | | | |
| | | | | | genomic survey sequence. | | | |
| | | GB_BA2: RSAF000233 | 5984 | AF000233 | Rhodobacter sphaeroides nitric oxide reductase operon: norC, norB, norQ, norD, | Rhodobacter sphaeroides | 37,500 | 6-Jun-97 |
| | | | | | nnrT and nnrU genes, complete cds. | | | |
| rxa00101 | | | | | | | | |
| rxa00108 | 643 | GB_PR4: AC007115 | 180821 | AC007115 | Homo sapiens chromosome 12 clone 917O5, complete sequence. | Homo sapiens | 35,165 | 17-Aug-99 |
| | | GB_PR3: AC004080 | 129354 | AC004080 | Homo sapiens PAC clone DJ0170O19 from 7p15-p21, complete sequence. | Homo sapiens | 38,560 | 29-Jan-98 |
| | | GB_HTG1: HSAJ9613 | 45302 | AJ009613 | Homo sapiens chromosome 17 clone cosmid 5L5 map p11,*** SEQUENCING | Homo sapiens | 39,274 | 11-Nov-98 |
| | | | | | IN PROGRESS ***, in unordered pieces. | | | |
| rxa00110 | 672 | GB_PL1: MIATGENB | 166924 | Y08502 | A. thaliana mitochondrial genome, part B. | Mitochondrion Arabidopsis | 36,391 | 13-Nov-98 |
| | | | | | | thaliana | | |
| | | GB_PL2: AC010718 | 87684 | AC010718 | Arabidopsis thaliana chromosome I BAC F28O16 genomic | Arabidopsis thaliana | 36,622 | 30-OCT-1999 |
| | | | | | sequence, complete sequence. | | | |
| | | GB_PL2: AC007729 | 106639 | AC007729 | Arabidopsis thaliana chromosome II BAC T18C6 genomic sequence, | Arabidopsis thaliana | 35,053 | 5-Jun-99 |
| | | | | | complete sequence. | | | |
| rxa00114 | 612 | GB_OM: BTMICSD1 | 362 | Z27071 | B. taurus (cos1E3) microsatellite DNA (362 bp). | Bos taurus | 37,117 | 10-Aug-95 |
| | | GB_OM: BTMICSD1 | 362 | Z27071 | B. taurus (cos1E3) microsatellite DNA (362 bp). | Bos taurus | 36,486 | 10-Aug-95 |
| rxa00117 | 714 | GB_PL2: AF080249 | 3194 | AF080249 | Arabidopsis thaliana kinesin-like heavy chain (KATD) mRNA, complete cds. | Arabidopsis thaliana | 37,846 | 14-Apr-99 |
| | | GB_PL2: IG002P16 | 110946 | AF007270 | Arabidopsis thaliana BAC IG002P16. | Arabidopsis thaliana | 37,110 | 12-Jun-97 |
| | | GB_PL2: AF080249 | 3194 | AF080249 | Arabidopsis thaliana kinesin-like heavy chain (KATD) mRNA, complete cds. | Arabidopsis thaliana | 36,506 | 14-Apr-99 |
| rxa00118 | 378 | GB_HTG2: AC008043 | 124844 | AC008043 | Drosophila melanogaster chromosome 3 clone BACR05A08 (D750) RPCI-98 | Drosophila melanogaster | 33,780 | 2-Aug-99 |
| | | | | | 05.A.8 map 94A-94A strain y; cn bw sp, *** SEQUENCING IN PROGRESS ***, | | | |
| | | | | | 86 unordered pieces. | | | |
| | | GB_HTG2: AC008043 | 124844 | AC008043 | Drosophila melanogaster chromosome 3 clone BACR05A08 (D750) RPCI-98 | Drosophila melanogaster | 33,780 | 2-Aug-99 |
| | | | | | 05.A.8 map 94A-94A strain y; cn bw sp, *** SEQUENCING IN PROGRESS***, | | | |
| | | | | | 86 unordered pieces. | | | |
| | | GB_PR3: AC004827 | 129690 | AC004827 | Homo sapiens PAC clone DJ044L15 from Xq23, complete sequence. | Homo sapiens | 32,320 | 17-OCT-1998 |
| rxa00119 | 882 | GB_PR4: HSU34879 | 46610 | U34879 | Human 17-beta-hydroxysteroid dehydrogenase (EDH17B2) gene, complete cds. | Homo sapiens | 36,671 | 14-Jan-99 |
| | | GB_PR4: HSU34879 | 46610 | U34879 | Human 17-beta-hydroxysteroid dehydrogenase (EDH17B2) gene, complete cds. | Homo sapiens | 38,345 | 14-Jan-99 |
| | | GB_EST37: AW005997 | 702 | AW005997 | wz91c01.x1 NCI_CGAP_Brn25 Homo sapiens cDNA clone IMAGE: | Homo sapiens | 40,774 | 10-Sep-99 |
| | | | | | 2566176 3′ similar to TR: O08609 O08609 TRANSCRIPTION | | | |
| | | | | | FACTOR-LIKE PROTEIN 4.;, mRNA sequence. | | | |
| rxa00120 | 963 | GB_BA1: TRU80216 | 1936 | U80216 | Thermomicrobium roseum 70 kDa heat shock protein Hsp70 (DnaK) | Thermomicrobium roseum | 38,000 | 1-Feb-97 |
| | | | | | gene, complete cds. | | | |
| | | GB_HTG1: HS791K14 | 155318 | AL035685 | Homo sapiens chromosome 20 clone RP4-791K14, *** SEQUENCING | Homo sapiens | 37,277 | 23-Nov-99 |
| | | | | | IN PROGRESS ***, in unordered pieces. | | | |
| | | GB_HTG1: HS791K14 | 155318 | AL035685 | Homo sapiens chromosome 20 clone RP4-791K14, *** SEQUENCING | Homo sapiens | 37,277 | 23-Nov-99 |
| | | | | | IN PROGRESS ***, in unordered pieces. | | | |
| rxa00121 | 834 | GB_HTG1: HSBA298O6 | 198847 | AL118525 | Homo sapiens chromosome 20 clone RP11-298O6, *** SEQUENCING | Homo sapiens | 36,199 | 24-Nov-99 |
| | | | | | IN PROGRESS ***, in unordered pieces. | | | |
| | | GB_HTG1: HS791K14 | 155318 | AL035685 | Homo sapiens chromosome 20 clone RP4-791K14, *** SEQUENCING | Homo sapiens | 36,983 | 23-Nov-99 |
| | | | | | IN PROGRESS ***, in unordered pieces. | | | |
| | | GB_HTG1: HS791K14 | 155318 | AL035685 | Homo sapiens chromosome 20 clone RP4-791K14,*** SEQUENCING | Homo sapiens | 36,983 | 23-Nov-99 |
| | | | | | IN PROGRESS ***, in unordered pieces. | | | |
| rxa00122 | 1746 | GB_PL1: MZECPN60A | 6575 | L21007 | Corn nuclear-encoded mitochondrial chaperonin 60 (cpn60I) gene, complete cds. | Zea mays | 36,098 | 26-Jul-93 |
| | | GB_PL1: ZMCPNAGA | 2247 | Z12114 | Z. mays CPNA gene encoding mitochondrial chaperonin-60. | Zea mays | 37,702 | 01-OCT-1992 |
| | | GB_PL1: ZMCHHSP60 | 2138 | Z11546 | Z. mays mRNA for mitochondrial chaperonin hsp60. | Zea mays | 37,721 | 11-Jun-92 |
| rxa00127 | 588 | GB_PR4: AC005193 | 108400 | AC005193 | Homo sapiens clone DJ0655N24, complete sequence. | Homo sapiens | 37,500 | 1-Jul-99 |
| | | GB_PR4: AC005193 | 108400 | AC005193 | Homo sapiens clone DJ0655N24, complete sequence. | Homo sapiens | 36,796 | 1-Jul-99 |
| rxa00128 | 1827 | GB_GSS11: AQ299024 | 449 | AQ299024 | HS_3178_B1_B06_T7 CIT Approved Human Genomic Sperm Library D | Homo sapiens | 40,757 | 15-DEC-1998 |
| | | | | | Homo sapiens genomic clone Plate = 3178 Col = 11 Row = D, | | | |
| | | | | | genomic survey sequence. | | | |
| | | GB_GSS11: AQ299024 | 449 | AQ299024 | HS_3178_B1_B06_T7 CIT Approved Human Genomic Sperm Library D | Homo sapiens | 40,443 | 15-DEC-1998 |
| | | | | | Homo sapiens genomic clone Plate = 3178 Col = 11 Row = D, | | | |
| | | | | | genomic survey sequence. | | | |
| rxa00134 | 693 | GB_GSS10: AQ177172 | 393 | AQ177172 | HS_3225_A2_E10_MR CIT Approved Human Genomic Sperm Library D | Homo sapiens | 50,000 | 17-OCT-1998 |
| | | | | | Homo sapiens genomic clone Plate = 3225 Col = 20 Row = I, | | | |
| | | | | | genomic survey sequence. | | | |
| | | GB_PR3: AC005726 | 185215 | AC005726 | Homo sapiens chromosome 17, clone hRPK.192_H_23, complete sequence. | Homo sapiens | 37,778 | 30-OCT-1998 |
| | | GB_PR3: AC005726 | 185215 | AC005726 | Homo sapiens chromosome 17, clone hRPK.192_H_23, complete sequence. | Homo sapiens | 38,710 | 30-OCT-1998 |
| rxa00140 | 309 | GB_VI: OPU75930 | 131993 | U75930 | Orgyia pseudotsugata nuclear polyhedrosis virus complete genome. | Orgyia pseudotsugata | 39,007 | 06-MAR-1998 |
| | | | | | | nuclear polyhedrosis virus | | |
| | | GB_HTG2: AC006319 | 156299 | AC006319 | Homo sapiens clone DJ0837C09, *** SEQUENCING IN PROGRESS ***, | Homo sapiens | 31,773 | 23-Apr-99 |
| | | | | | 1 unordered pieces. | | | |
| | | GB_HTG2: AC006319 | 156299 | AC006319 | Homo sapiens clone DJ0837C09, *** SEQUENCING IN PROGRESS ***, | Homo sapiens | 31,773 | 23-Apr-99 |
| | | | | | 1 unordered pieces. | | | |
| rxa00141 | 585 | GB_VI: OPU75930 | 131993 | U75930 | Orgyia pseudotsugata nuclear polyhedrosis virus complete genome. | Orgyia pseudotsugata | 38,079 | 06-MAR-1998 |
| | | | | | | nuclear polyhedrosis virus | | |
| | | GB_PR4: AC004526 | 297898 | AC004526 | Homo sapiens chromosome 17, Neurofibromatosis 1 locus, complete sequence. | Homo sapiens | 37,336 | 25-Feb-99 |
| | | GB_PR2: HUMNEUROF | 100849 | L05367 | Human oligodendrocyte myelin glycoprotein (OMG) exons 1-2; neurofibromatosis 1 | Homo sapiens | 37,336 | 20-Sep-95 |
| | | | | | (NF1) exons 28-49; ecotropic viral integration site 2B (EVI2B) exons 1-2; ecotropic | | | |
| | | | | | viral integration site 2A (EVI2A) exons 1-2; adenylate kinase (AK3) exons 1-2. | | | |
| rxa00142 | 600 | GB_PR4: HUAC002331 | 139480 | AC002331 | Homo sapiens Chromosome 16 BAC clone | Homo sapiens | 38,898 | 23-Nov-99 |
| | | | | | CIT987SK-A-A-218C7, complete sequence. | | | |
| | | GB_PR3: AF064861 | 133965 | AF064861 | Homo sapiens PAC 128M19 derived from chromosome 21q22.3, containing | Homo sapiens | 37,182 | 2-Jun-98 |
| | | | | | the HMG-14 and CHD5 genes, complete cds, complete sequence. | | | |
| | | GB_HTG3: AC009451 | 165302 | AC009451 | Homo sapiens chromosome 17 clone 2286_H_12 map 17, *** SEQUENCING | Homo sapiens | 33,167 | 22-Aug-99 |
| | | | | | IN PROGRESS ***, 26 unordered pieces. | | | |
| rxa00150 | 897 | GB_PR4: AF130343 | 292721 | AF130343 | Homo sapiens chromosome 8 clone PAC 87.2 map 8q24.1, complete sequence. | Homo sapiens | 36,032 | 9-Jul-99 |
| | | GB_HTG4: AC008578 | 98891 | AC008578 | Homo sapiens chromosome 5 clone CIT-HSPC_558D4, *** SEQUENCING | Homo sapiens | 38,129 | 31-OCT-1999 |
| | | | | | IN PROGRESS ***, 143 unordered pieces. | | | |
| | | GB_HTG4: AC008578 | 98891 | AC008578 | Homo sapiens chromosome 5 clone CIT-HSPC_558D4, *** SEQUENCING | Homo sapiens | 38,129 | 31-OCT-1999 |
| | | | | | IN PROGRESS ***, 143 unordered pieces. | | | |
| rxa00151 | 720 | GB_PL2: AF058914 | 111767 | AF058914 | Arabidopsis thaliana BAC F21E10. | Arabidopsis thaliana | 36,068 | 15-Apr-98 |
| | | GB_PR1: AB019440 | 200000 | AB019440 | Homo sapiens DNA for immunoglobulin heavy-chain variable region, | Homo sapiens | 36,517 | 24-Feb-99 |
| | | | | | complete sequence, 4 of 5. | | | |
| | | GB_PR2: AP000098 | 100000 | AP000098 | Homo sapiens genomic DNA of 21q22.1, GART and AML related, Q78C10-149C3 | Homo sapiens | 39,224 | 25-Sep-99 |
| | | | | | region, segment 1/20, complete sequence. | | | |
| rxa00153 | 549 | GB_PR4: AC006265 | 177707 | AC006265 | Homo sapiens chromosome 17, clone hRPK.566_B_16, complete sequence. | Homo sapiens | 34,862 | 28-Jan-99 |
| | | GB_HTG2: AC007389 | 207188 | AC007389 | Homo sapiens clone NH0418H16, *** SEQUENCING IN PROGRESS ***, | Homo sapiens | 36,044 | 5-Jun-99 |
| | | | | | 6 unordered pieces. | | | |
| | | GB_HTG2: AC007389 | 207188 | AC007389 | Homo sapiens clone NH0418H16, *** SEQUENCING IN PROGRESS ***, | Homo sapiens | 36,044 | 5-Jun-99 |
| | | | | | 6 unordered pieces. | | | |
| rxa00154 | | | | | | | | |
| rxa00155 | 906 | GB_BA2: AE001707 | 19518 | AE001707 | Thermotoga maritima section 19 of 136 of the complete genome. | Thermotoga maritima | 36,854 | 2-Jun-99 |
| | | GB_PR2: HS1126I14 | 19544 | AL078589 | Human DNA sequence from clone 1126I14 on chromosome 6q16.1-16.3. | Homo sapiens | 36,723 | 23-Nov-99 |
| | | | | | Contains an STS and GSSs, complete sequence. | | | |
| | | GB_BA1: MTCY01B2 | 35938 | Z95554 | Mycobacterium tuberculosis H37Rv complete genome; segment 72/162. | Mycobacterium | 40,435 | 17-Jun-98 |
| | | | | | | tuberculosis | | |
| rxa00159 | 1305 | GB_EST38: AW048718 | 475 | AW048718 | UI-M-BH1-amy-d-01-0-UI.s1 NIH_BMAP_M_S2 Mus musculus cDNA clone | Mus musculus | 39,789 | 18-Sep-99 |
| | | | | | UI-M-BH1-amy-d-01-0-UI 3′, mRNA sequence. | | | |
| | | GB_EST21: AA993450 | 381 | AA993450 | ot32h09.s1 Soares_testis_NHT Homo sapiens cDNA clone IMAGE: 1618529 | Homo sapiens | 38,684 | 27-Aug-98 |
| | | | | | 3′, mRNA sequence. | | | |
| | | GB_BA1: AB007009 | 363 | AB007009 | Cytophaga sp. 16S rRNA gene, partial sequence. | Cytophaga sp. | 39,039 | 13-OCT-1997 |
| rxa00161 | 585 | GB_HTG3: AC009708 | 25123 | AC009708 | Homo sapiens chromosome 8 clone 318_G_5 map 8, LOW-PASS | Homo sapiens | 37,108 | 28-Aug-99 |
| | | | | | SEQUENCE SAMPLING. | | | |
| | | GB_HTG3: AC009708 | 25123 | AC009708 | Homo sapiens chromosome 8 clone 318_G_5 map 8, | Homo sapiens | 37,108 | 28-Aug-99 |
| | | | | | LOW-PASS SEQUENCE SAMPLING. | | | |
| | | GB_PR3: HSN104C4 | 40203 | Z83855 | Human DNA sequence from clone N104C4 on chromosome 22 | Homo sapiens | 37,634 | 23-Nov-99 |
| | | | | | Contains GSSs, complete sequence. | | | |
| rxa00162 | 477 | GB_HTG1: CEY94A7 | 41009 | Z99294 | Caenorhabditis elegans chromosome V clone Y94A7, *** SEQUENCING | Caenorhabditis elegans | 41,502 | 18-Sep-97 |
| | | | | | IN PROGRESS ***, in unordered pieces. | | | |
| | | GB_HTG1: CEY94A7 | 41009 | Z99294 | Caenorhabditis elegans chromosome V clone Y94A7, *** SEQUENCING | Caenorhabditis elegans | 41,502 | 18-Sep-97 |
| | | | | | IN PROGRESS ***, in unordered pieces. | | | |
| | | GB_BA2: AE001182 | 11228 | AE001182 | Borrelia burgdorferi (section 68 of 70) of the complete genome. | Borrelia burgdorferi | 39,655 | 15-DEC-1997 |
| rxa00167 | 621 | GB_HTG7: AC007937 | 206265 | AC007937 | Mus musculus chromosome 10 clone RP21-536F4 map 10, *** SEQUENCING | Mus musculus | 37,092 | 09-DEC-1999 |
| | | | | | IN PROGRESS ***, 6 unordered pieces. | | | |
| | | GB_RO: MMU6590 | 6429 | AJ006590 | Mus musculus mRNA for GANP protein. | Mus musculus | 38,678 | 2-Jun-99 |
| | | GB_HTG3: AC008852 | 116219 | AC008852 | Homo sapiens chromosome 5 clone CITB-H1_2176I21, *** SEQUENCING | Homo sapiens | 35,691 | 3-Aug-99 |
| | | | | | IN PROGRESS ***, 13 unordered pieces. | | | |
| rxa00169 | 2196 | GB_GSS3: B11032 | 896 | B11032 | T17F10-T7 TAMU Arabidopsis thaliana genomic clone T17F10, | Arabidopsis thaliana | 42,024 | 14-MAY-1997 |
| | | | | | genomic survey sequence. | | | |
| | | GB_GSS3: B10120 | 909 | B10120 | T27N10-Sp6.1 TAMU Arabidopsis thaliana genomic clone T27N10, | Arabidopsis thaliana | 41,581 | 14-MAY-1997 |
| | | | | | genomic survey sequence. | | | |
| | | GB_GSS3: B09409 | 916 | B09409 | T27M2-Sp6 TAMU Arabidopsis thaliana genomic clone T27M2, | Arabidopsis thaliana | 41,356 | 14-MAY-1997 |
| | | | | | genomic survey sequence. | | | |
| rxa00170 | 1977 | GB_GSS8: AQ027582 | 456 | AQ027582 | CIT-HSP-2325M20. TR CIT-HSP Homo sapiens genomic clone | Homo sapiens | 40,749 | 30-Jun-98 |
| | | | | | 2325M20, genomic survey sequence. | | | |
| | | GB_GSS6: AQ833529 | 484 | AQ833529 | HS_5304_B2_C02_T7A RPCI-11 Human Male BAC Library Homo sapiens | Homo sapiens | 38,017 | 27-Aug-99 |
| | | | | | genomic clone Plate = 880 Col = 4 Row = F, genomic survey sequence. | | | |
| | | GB_PR2: HSM800174 | 2326 | AL049389 | Homo sapiens mRNA; cDNA DKFZp586O0118 (from clone DKFZp586O0118). | Homo sapiens | 37,556 | 21-MAY-1999 |
| rxa00171 | 281 | GB_EST38: AL118463 | 279 | AL118463 | w9112a43 Beddington mouse dissected endoderm Mus musculus cDNA clone | Mus musculus | 50,000 | 23-Sep-99 |
| | | | | | 528_12E22 5′, mRNA sequence. | | | |
| | | GB_EST15: AA499834 | 419 | AA499834 | vg05e06.r1 Soares mouse NbMH Mus musculus cDNA clone IMAGE: 860482 | Mus musculus | 39,801 | 1-Jul-97 |
| | | | | | 5′, mRNA sequence. | | | |
| | | GB_EST24: AI211527 | 431 | AI211527 | p0h01a1.r1 Aspergillus nidulans 24 hr asexual developmental and vegetative | Emericella nidulans | 41,584 | 19-OCT-1998 |
| | | | | | cDNA lambda zap library Emericella nidulans cDNA clone p0h01a1 | | | |
| | | | | | 5′, mRNA sequence. | | | |
| rxa00173 | 456 | GB_PR3: AC004400 | 33367 | AC004400 | Homo sapiens chromosome 19, cosmid F24069, complete sequence. | Homo sapiens | 38,902 | 12-MAR-1998 |
| | | GB_PL1: VFU14956 | 1474 | U14956 | Vicia faba ferredoxin NADP+ reductase precursor (fnr) mRNA, complete cds. | Vicia faba | 38,753 | 28-Sep-94 |
| | | GB_PR3: AC004400 | 33367 | AC004400 | Homo sapiens chromosome 19, cosmid F24069, complete sequence. | Homo sapiens | 40,515 | 12-MAR-1998 |
| rxa00174 | 408 | GB_PL2: AF075293 | 4332 | AF075293 | Candida albicans strain 1161 agglutinin-like protein 6 (ALS6) gene, complete cds. | Candida albicans | 41,235 | 2-Jul-99 |
| | | GB_PL2: JSPCHS1 | 1525 | X94995 | Juglans nigra x Juglans regia mRNA for chalcone synthase (CHS1). | Juglans nigra x Juglans | 39,558 | 19-Nov-99 |
| | | | | | | regia | | |
| | | GB_PL2: JSPCHS2 | 1534 | X94706 | Juglans nigra x Juglans regia mRNA for chalcone synthase (CHS2). | Juglans nigra x Juglans | 38,821 | 19-Nov-99 |
| | | | | | | regia | | |
| rxa00175 | | | | | | | | |
| rxa00179 | 582 | GB_BA1: CGPUTP | 3791 | Y09163 | C. glutamicum putP gene. | Corynebacterium | 100,000 | 8-Sep-97 |
| | | | | | | glutamicum | | |
| | | GB_IN2: L76038 | 2421 | L76038 | Anopheles gambiae prophenoloxidase mRNA, complete cds. | Anopheles gambiae | 35,751 | 23-Jul-98 |
| | | GB_IN2: AF031626 | 8486 | AF031626 | Anopheles gambiae prophenoloxidase (AgProPO) gene, complete cds. | Anopheles gambiae | 36,395 | 5-Jan-99 |
| rxa00180 | 663 | GB_BA1: CGPUTP | 3791 | Y09163 | C. glutamicum putP gene. | Corynebacterium | 100,000 | 8-Sep-97 |
| | | | | | | glutamicum | | |
| | | GB_HTG1: HS120G22 | 57021 | AL031847 | Homo sapiens chromosome 1 clone RP1-120G22, *** SEQUENCING | Homo sapiens | 35,976 | 23-Nov-99 |
| | | | | | IN PROGRESS ***, in unordered pieces. | | | |
| | | GB_HTG1: HS120G22 | 57021 | AL031847 | Homo sapiens chromosome 1 clone RP1-120G22, *** SEQUENCING | Homo sapiens | 35,976 | 23-Nov-99 |
| | | | | | IN PROGRESS ***, in unordered pieces. | | | |
| rxa00183 | 975 | GB_IN2: AF049132 | 16005 | AF049132 | Florometra serratissima mitochondrion, complete genome. | Mitochondrion Florometra | 33,710 | 15-Jan-99 |
| | | | | | | serratissima | | |
| | | GB_IN1: MTCE | 13794 | X54252 | C. elegans complete mitochondrial genome. | Mitochondrion | 35,036 | 30-Nov-97 |
| | | | | | | Caenorhabditis elegans | | |
| | | GB_IN2: AF049132 | 16005 | AF049132 | Florometra serratissima mitochondrion, complete genome. | Mitochondrion Florometra | 36,021 | 15-Jan-99 |
| | | | | | | serratissima | | |
| rxa00185 | 2751 | GB_EST31: AI693167 | 500 | AI693167 | wd68c11.x1 NCI_CGAP_Lu24 Homo sapiens cDNA clone IMAGE: 2336756 | Homo sapiens | 37,800 | 2-Jun-99 |
| | | | | | 3′ similar to SW: HIOM_BOVIN P10950 HYDROXYINDOLE | | | |
| | | | | | O-METHYLTRANSFERASE;, mRNA sequence. | | | |
| | | GB_GSS1: CNS010IZ | 1000 | AL099029 | Drosophila melanogaster genome survey sequence SP6 end of BAC | Drosophila melanogaster | 35,158 | 26-Jul-99 |
| | | | | | BACN04K17 of DrosBAC library from Drosophila melanogaster (fruit fly), | | | |
| | | | | | genomic survey sequence. | | | |
| | | GB_EST31: AI693167 | 500 | AI693167 | wd68c11.x1 NCI_CGAP_Lu24 Homo sapiens cDNA clone IMAGE: 2336756 | Homo sapiens | 39,052 | 2-Jun-99 |
| | | | | | 3′ similar to SW: HIOM_BOVIN P10950 HYDROXYINDOLE | | | |
| | | | | | O-METHYLTRANSFERASE;, mRNA sequence. | | | |
| rxa00194 | 564 | GB_GSS10: AQ192671 | 396 | AQ192671 | HS_2251_B2_A04_MF CIT Approved Human Genomic Sperm Library D | Homo sapiens | 44,240 | 4-Nov-98 |
| | | | | | Homo sapiens genomic clone Plate = 2251 Col = 8 Row = B, | | | |
| | | | | | genomic survey sequence. | | | |
| | | GB_GSS8: AQ044307 | 644 | AQ044307 | CIT-HSP-2331N9.TR CIT-HSP Homo sapiens genomic clone 2331N9, | Homo sapiens | 36,150 | 14-Jul-98 |
| | | | | | genomic survey sequence. | | | |
| | | GB_EST36: AI925874 | 564 | AI925874 | wo20d11.x1 NCI_CGAP_Pan1 Homo sapiens cDNA clone IMAGE: 2455893 | Homo sapiens | 45,588 | 2-Sep-99 |
| | | | | | 3′ similar to TR: O67849 O67849 GTP-BINDING PROTEIN.;, | | | |
| | | | | | mRNA sequence. | | | |
| rxa00197 | 1335 | GB_GSS12: AQ399208 | 436 | AQ399208 | mgxb0001M23f CUGI Rice Blast BAC Library Magnaporthe grisea genomic | Magnaporthe grisea | 63,529 | 06-MAR-1999 |
| | | | | | clone mgxb0001M23f, genomic survey sequence. | | | |
| | | GB_GSS12: AQ398449 | 472 | AQ398449 | mgxb0001P11f CUGI Rice Blast BAC Library Magnaporthe grisea genomic | Magnaporthe grisea | 49,580 | 06-MAR-1999 |
| | | | | | clone mgxb0001P11f, genomic survey sequence. | | | |
| | | GB_OM: BTMMP9 | 2350 | X78324 | B. taurus bmmp9 mRNA for matrix metalloproteinase. | Bos taurus | 40,440 | 30-MAR-1995 |
| rxa00199 | 1542 | GB_BA1: AB024708 | 8734 | AB024708 | Corynebacterium glutamicum gltB and gltD genes for glutamine 2-oxoglutarate | Corynebacterium | 36,237 | 13-MAR-1999 |
| | | | | | aminotransferase large and small subunits, complete cds. | glutamicum | | |
| | | GB_HTG2: AC007837 | 103949 | AC007837 | Drosophila melanogaster chromosome 2 clone BACR04I07 (D644) RPCI-98 | Drosophila melanogaster | 36,045 | 2-Aug-99 |
| | | | | | 04.I.7 map 57B2-B3 strain y; cn bw sp, *** SEQUENCING IN PROGRESS***, | | | |
| | | | | | 49 unordered pieces. | | | |
| | | GB_HTG2: AC007837 | 103949 | AC007837 | Drosophila melanogaster chromosome 2 clone BACR04I07 (D644) RPCI-98 | Drosophila melanogaster | 36,045 | 2-Aug-99 |
| | | | | | 04.I.7 map 57B2-B3 strain y; cn bw sp, *** SEQUENCING IN PROGRESS***, | | | |
| | | | | | 49 unordered pieces. | | | |
| rxa00200 | 3561 | GB_BA2: MSU46844 | 16951 | U46844 | Mycobacterium smegmatis catalase-peroxidase (katG), putative | Mycobacterium smegmatis | 53,937 | 12-MAY-1997 |
| | | | | | arabinosyl transferase (embC, embA, embB), genes complete cds and putative | | | |
| | | | | | propionyl-coA carboxylase beta chain (pccB) genes, partial cds. | | | |
| | | GB_BA2: MAU66560 | 7853 | U66560 | Mycobacterium avium EmbR (embR), EmbA (embA) and EmbB (embB) | Mycobacterium avium | 52,241 | 8-Nov-96 |
| | | | | | genes, complete cds. | | | |
| | | GB_BA1: MTY13D12 | 37085 | Z80343 | Mycobacterium tuberculosis H37Rv complete genome; segment 156/162. | Mycobacterium | 52,812 | 17-Jun-98 |
| | | | | | | tuberculosis | | |
| rxa00207 | 441 | GB_PR3: HTCRBCHR9 | 216293 | AF029308 | Homo sapiens chromosome 9 duplication of the T cell receptor beta locus | Homo sapiens | 39,286 | 13-Apr-98 |
| | | | | | and trypsinogen gene families. | | | |
| | | GB_PR3: HTCRBCHR9 | 216293 | AF029308 | Homo sapiens chromosome 9 duplication of the T cell receptor beta locus | Homo sapiens | 37,116 | 13-Apr-98 |
| | | | | | and trypsinogen gene families. | | | |
| rxa00211 | 786 | GB_PR2: HSU81831 | 38674 | U81831 | Human cosmid LL12NCO1-67C6, ETV6 gene, intron 1A, partial sequence. | Homo sapiens | 35,509 | 3-Jan-97 |
| | | GB_RO: MUSKROX2S2 | 2868 | M28845 | Mus musculus zinc finger protein (Krox-24) gene, exon 2. | Mus musculus | 40,566 | 21-MAY-1996 |
| | | GB_HTG2: AC007440 | 120642 | AC007440 | Drosophila melanogaster chromosome 2 clone BACR37I09 (D593) RPCI-98 | Drosophila melanogaster | 36,753 | 2-Aug-99 |
| | | | | | 37.I.9 map 49A-49B strain y; cn bw sp, *** SEQUENCING IN PROGRESS ***, | | | |
| | | | | | 103 unordered pieces. | | | |
| rxa00218 | | | | | | | | |
| rxa00220 | 627 | GB_BA1: ASU04436 | 4668 | U04436 | Anabaena sp. PCC 7120 putative polyketide synthase gene, complete cds. | Anabaena sp. | 33,766 | 21-DEC-1993 |
| | | GB_RO: AF068199 | 3490 | AF068199 | Mus musculus D-dopachrome tautomerase gene, complete cds. | Mus musculus | 38,833 | 26-Aug-98 |
| | | GB_RO: AF068199 | 3490 | AF068199 | Mus musculus D-dopachrome tautomerase gene, complete cds. | Mus musculus | 34,776 | 26-Aug-98 |
| rxa00222 | 1269 | GB_PL1: AB011477 | 78181 | AB011477 | Arabidopsis thaliana genomic DNA, chromosome 5, P1 clone: | Arabidopsis thaliana | 36,766 | 20-Nov-99 |
| | | | | | MHK7, complete sequence. | | | |
| | | GB_EST17: AA615900 | 427 | AA615900 | vo91b05.r1 Barstead mouse irradiated colon MPLRB7 Mus musculus cDNA | Mus musculus | 39,782 | 07-OCT-1997 |
| | | | | | clone IMAGE: 1066449 5′ similar to SW: MUCL_RAT P98089 INTESTINAL | | | |
| | | | | | MUCIN-LIKE PROTEIN;, mRNA sequence. | | | |
| | | GB_EST38: AW039188 | 486 | AW039188 | EST281423 tomato mixed elicitor, BTI Lycopersicon esculentum cDNA | Lycopersicon esculentum | 41,286 | 18-OCT-1999 |
| | | | | | clone cLET9F17, mRNA sequence. | | | |
| rxa00230 | 843 | GB_PR3: AC005255 | 94343 | AC005255 | Homo sapiens chromosome 19, CIT-HSP-146e8, complete sequence. | Homo sapiens | 35,990 | 6-Jul-98 |
| | | GB_PR3: AC005255 | 94343 | AC005255 | Homo sapiens chromosome 19, CIT-HSP-146e8, complete sequence. | Homo sapiens | 38,175 | 6-Jul-98 |
| rxa00232 | 633 | GB_HTG2: AC007118 | 200000 | AC007118 | Homo sapiens chromosome 4, *** SEQUENCING IN PROGRESS ***, | Homo sapiens | 36,772 | 19-MAR-1999 |
| | | | | | 45 unordered pieces. | | | |
| | | GB_HTG2: AC007118 | 200000 | AC007118 | Homo sapiens chromosome 4, *** SEQUENCING IN PROGRESS ***, | Homo sapiens | 36,772 | 19-MAR-1999 |
| | | | | | 45 unordered pieces. | | | |
| | | GB_GSS1: CNS004WZ | 978 | AL055537 | Drosophila melanogaster genome survey sequence TET3 end of BAC | Drosophila melanogaster | 34,518 | 3-Jun-99 |
| | | | | | # BACR11G02 of RPCI-98 library from Drosophila melanogaster (fruit fly), | | | |
| | | | | | genomic survey sequence. | | | |
| rxa00233 | 517 | GB_BA1: AB006206 | 7443 | AB006206 | Streptomyces griseus AmfR, AmfA and AmfB genes and 4 ORFs, complete cds. | Streptomyces griseus | 38,690 | 5-Feb-99 |
| | | GB_PR4: AC006999 | 112878 | AC006999 | Homo sapiens clone NH0462A19, complete sequence. | Homo sapiens | 40,244 | 17-Jul-99 |
| | | GB_HTG2: AC007042 | 132400 | AC007042 | Homo sapiens clone NH0399H17, *** SEQUENCING IN PROGRESS ***, | Homo sapiens | 40,244 | 06-MAR-1999 |
| | | | | | 5 unordered pieces. | | | |
| rxa00234 | 663 | GB_PAT: E13059 | 3480 | E13059 | gDNA encoding cytochrome b5. | unidentified | 40,091 | 24-Jun-98 |
| | | GB_PL1: AB022444 | 2104 | AB022444 | Mortierella alpina gene for cytochrome b5, complete cds. | Mortierella alpina | 42,314 | 14-Jul-99 |
| | | GB_GSS9: AQ112619 | 443 | AQ112619 | CIT-HSP-2371D11.TR CIT-HSP Homo sapiens genomic clone 2371D11, | Homo sapiens | 39,623 | 29-Aug-98 |
| | | | | | genomic survey sequence. | | | |
| rxa00236 | 849 | GB_BA1: CGPROMF34 | 60 | X90361 | C. glutamicum DNA for promoter fragment F34. | Corynebacterium | 98,333 | 4-Nov-96 |
| | | | | | | glutamicum | | |
| | | GB_IN1: CEF56G4 | 38062 | Z81552 | Caenorhabditis elegans cosmid F56G4, complete sequence. | Caenorhabditis elegans | 36,190 | 08-OCT-1999 |
| | | GB_EST16: C51159 | 370 | C51159 | C51159 Yuji Kohara unpublished cDNA: Strain N2 hermaphrodite embryo | Caenorhabditis elegans | 41,096 | 18-OCT-1999 |
| | | | | | Caenorhabditis elegans cDNA clone yk491h3 5′, mRNA sequence. | | | |
| rxa00237 | 501 | GB_GSS9: AQ148605 | 511 | AQ148605 | HS_3137_B2_A11_T7 CIT Approved Human Genomic Sperm Library D | Homo sapiens | 37,959 | 08-OCT-1998 |
| | | | | | Homo sapiens genomic clone Plate = 3137 Col = 22 Row = B, | | | |
| | | | | | genomic survey sequence. | | | |
| | | GB_GSS11: AQ274889 | 622 | AQ274889 | RPCI-5-1111N8T7 RPCI-5 Homo sapiens genomic clone RPCI-5-1111N8T7, | Homo sapiens | 44,628 | 10-Nov-98 |
| | | | | | genomic survey sequence. | | | |
| | | GB_GSS11: AQ274889 | 622 | AQ274889 | RPCI-5-1111N8T7 RPCI-5 Homo sapiens genomic clone RPCI-5-1111N8T7, | Homo sapiens | 37,321 | 10-Nov-98 |
| | | | | | genomic survey sequence. | | | |
| rxa00238 | 492 | GB_PL2: PBU91560 | 2605 | U91560 | Paracoccidioides brasiliensis heat shock protein 70 (Hsp70) gene, complete cds. | Paracoccidioides | 37,137 | 12-MAR-1999 |
| | | | | | | brasiliensis | | |
| | | GB_HTG6: AC007957 | 212658 | AC007957 | Homo sapiens, *** SEQUENCING IN PROGRESS ***, 2 ordered pieces. | Homo sapiens | 38,285 | 26-Nov-99 |
| | | GB_PR4: AC009288 | 140876 | AC009288 | Homo sapiens, complete sequence. | Homo sapiens | 36,575 | 19-Nov-99 |
| rxa00239 | 708 | GB_PL2: PBU91560 | 2605 | U91560 | Paracoccidioides brasiliensis heat shock protein 70 (Hsp70) gene, complete cds. | Paracoccidioides | 45,545 | 12-MAR-1999 |
| | | | | | | brasiliensis | | |
| | | GB_BA2: CJU96452 | 1450 | U96452 | Campylobacter jejuni major outer membrane porin gene, complete cds. | Campylobacter jejuni | 37,197 | 02-DEC-1998 |
| | | GB_RO: RATPF4 | 1675 | M15254 | Rat platelet factor 4 (PF4) gene. | Rattus norvegicus | 35,014 | 27-Apr-93 |
| rxa00240 | 333 | GB_BA1: CGLYSI | 4232 | X60312 | C. glutamicum lysI gene for L-lysine permease. | Corynebacterium | 46,207 | 30-Jan-92 |
| | | | | | | glutamicum | | |
| | | GB_PR3: AC005358 | 184886 | AC005358 | Homo sapiens chromosome 17, clone hRPK.746_E_8, complete sequence. | Homo sapiens | 35,843 | 29-Aug-98 |
| | | GB_BA1: CGLYSI | 4232 | X60312 | C. glutamicum lysI gene for L-lysine permease. | Corynebacterium | 42,025 | 30-Jan-92 |
| | | | | | | glutamicum | | |
| rxa00242 | 1401 | GB_BA1: CGLYSI | 4232 | X60312 | C. glutamicum lysI gene for L-lysine permease. | Corynebacterium | 100,000 | 30-Jan-92 |
| | | | | | | glutamicum | | |
| | | GB_PR3: HSJ514B11 | 100494 | AL049554 | Human DNA sequence from clone 514B11 on chromosome 6q16.1-21 Contains | Homo sapiens | 37,010 | 23-Nov-99 |
| | | | | | an EST, STSs and GSSs, complete sequence. | | | |
| | | GB_HTG3: AC009393 | 137353 | AC009393 | Drosophila melanogaster chromosome 3 clone BACR17F05 (D977) RPCI-98 | Drosophila melanogaster | 39,600 | 27-Aug-99 |
| | | | | | 17.F.5 map 87D-87D strain y; cn bw sp, *** SEQUENCING IN PROGRESS ***, | | | |
| | | | | | 111 unordered pieces. | | | |
| rxa00244 | 759 | GB_HTG4: AC011290 | 148409 | AC011290 | Homo sapiens clone NH0064I02, *** SEQUENCING IN PROGRESS ***, | Homo sapiens | 38,102 | 15-OCT-1999 |
| | | | | | 3 unordered pieces. | | | |
| | | GB_HTG4: AC011290 | 148409 | AC011290 | Homo sapiens clone NH0064I02, *** SEQUENCING IN PROGRESS ***, | Homo sapiens | 38,102 | 15-OCT-1999 |
| | | | | | 3 unordered pieces. | | | |
| | | GB_EST23: AI077162 | 527 | AI077162 | TENU3384 T. cruzi epimastigote normalized cDNA Library Trypanosoma cruzi cDNA | Trypanosoma cruzi | 38,847 | 10-Aug-98 |
| | | | | | clone 28o6 5′ similar to TRANSPLANTATION ANTIGEN P35B | | | |
| | | | | | sp\|P23591 \|TUM3_MOUSE, mRNA sequence. | | | |
| rxa00245 | 1608 | GB_HTG2: AC007644 | 141048 | AC007644 | Homo sapiens chromosome 17 clone hRPK.19_F_16 map 17, *** SEQUENCING | Homo sapiens | 36,929 | 23-MAY-1999 |
| | | | | | IN PROGRESS ***, 17 unordered pieces. | | | |
| | | GB_HTG2: AC007644 | 141048 | AC007644 | Homo sapiens chromosome 17 clone hRPK.19_F_16 map 17, *** SEQUENCING | Homo sapiens | 36,929 | 23-MAY-1999 |
| | | | | | IN PROGRESS ***, 17 unordered pieces. | | | |
| | | GB_HTG2: AC007644 | 141048 | AC007644 | Homo sapiens chromosome 17 clone hRPK.19_F_16 map 17, *** SEQUENCING | Homo sapiens | 34,025 | 23-MAY-1999 |
| | | | | | IN PROGRESS ***, 17 unordered pieces. | | | |
| rxa00247 | 1050 | GB_PR2: AP000119 | 100000 | AP000119 | Homo sapiens genomic DNA of 21q22.1, GART and AML related, | Homo sapiens | 36,187 | 25-Sep-99 |
| | | | | | SLC5A3-f4A4 region, segment 2/8, complete sequence. | | | |
| | | GB_PR2: AP000051 | 100000 | AP000051 | Homo sapiens genomic DNA, chromosome 21q22.1, segment | Homo sapiens | 36,187 | 20-Nov-99 |
| | | | | | 22/28, complete sequence. | | | |
| | | GB_PR2: AP000166 | 100000 | AP000166 | Homo sapiens genomic DNA, chromosome 21q22.1, D21S226-AML region, | Homo sapiens | 37,942 | 20-Nov-99 |
| | | | | | clone B2344F14-f50E8, segment 2/9, complete sequence. | | | |
| rxa00248 | 846 | GB_PR4: AC006464 | 99908 | AC006464 | Homo sapiens BAC clone NH0436C12 from 2, complete sequence. | Homo sapiens | 36,797 | 22-OCT-1999 |
| | | GB_PR4: AC006238 | 211945 | AC006238 | Homo sapiens chromosome 18, clone hRPK.474_N_24, complete sequence. | Homo sapiens | 32,896 | 31-Jan-99 |
| | | GB_PR4: AC006238 | 211945 | AC006238 | Homo sapiens chromosome 18, clone hRPK.474_N_24, complete sequence. | Homo sapiens | 34,438 | 31-Jan-99 |
| rxa00250 | 870 | GB_GSS10: AQ244736 | 469 | AQ244736 | HS_2056_B1_F03_T7 CIT Approved Human Genomic Sperm Library D | Homo sapiens | 36,310 | 03-OCT-1998 |
| | | | | | Homo sapiens genomic clone Plate = 2056 Col = 5 Row = L, | | | |
| | | | | | genomic survey sequence. | | | |
| | | GB_PAT: I07323 | 340 | I07323 | Sequence 5 from Patent EP 0331961. | Unknown. | 38,125 | 02-DEC-1994 |
| | | GB_PR1: HS11Q13RP | 10777 | Y12377 | H. sapiens FGF/int-2 gene upstream flanking region. | Homo sapiens | 36,155 | 17-Apr-97 |
| rxa00252 | 366 | GB_BA1: MTCY20G9 | 37218 | Z77162 | Mycobacterium tuberculosis H37Rv complete genome; segment 25/162. | Mycobacterium | 39,554 | 17-Jun-98 |
| | | | | | | tuberculosis | | |
| | | GB_BA1: MTV004 | 69350 | AL009198 | Mycobacterium tuberculosis H37Rv complete genome; segment 144/162. | Mycobacterium | 40,443 | 18-Jun-98 |
| | | | | | | tuberculosis | | |
| | | GB_BA1: MTV004 | 69350 | AL009198 | Mycobacterium tuberculosis H37Rv complete genome; segment 144/162. | Mycobacterium | 41,803 | 18-Jun-98 |
| | | | | | | tuberculosis | | |
| rxa00256 | 894 | GB_PR4: AC005343 | 137213 | AC005343 | Homo sapiens Chromosome 12p13.3 BAC RPCI11-21K20 (Roswell Park | Homo sapiens | 36,436 | 2-Apr-99 |
| | | | | | Cancer Institute Human BAC Library) complete sequence. | | | |
| | | GB_PR3: AC003005 | 45084 | AC003005 | Human DNA from chromosome 19-specific cosmid F25419 containing ZNF | Homo sapiens | 36,395 | 22-OCT-1997 |
| | | | | | gene family members, genomic sequence, complete sequence. | | | |
| | | GB_HTG3: AC007930 | 67668 | AC007930 | Drosophila melanogaster chromosome 2 clone BACR49A06 (D772) RPCI-98 | Drosophila melanogaster | 32,503 | 20-Sep-99 |
| | | | | | 49.A.6 map 43B-43B strain y; cn bw sp, *** SEQUENCING IN PROGRESS***, | | | |
| | | | | | 40 unordered pieces. | | | |
| rxa00257 | 579 | GB_PR4: AC005343 | 137213 | AC005343 | Homo sapiens Chromosome 12p13.3 BAC | Homo sapiens | 37,063 | 2-Apr-99 |
| | | | | | RPCI11-21K20 (Roswell Park Cancer Institute Human | | | |
| | | | | | BAC Library) complete sequence. | | | |
| | | GB_HTG1: HS1096J16 | 194423 | AL121721 | Homo sapiens chromosome 20 clone | Homo sapiens | 37,217 | 23-Nov-99 |
| | | | | | RP5-1096J16, *** SEQUENCING IN PROGRESS ***, in | | | |
| | | | | | unordered pieces. | | | |
| | | GB_HTG1: HS1096J16 | 194423 | AL121721 | Homo sapiens chromosome 20 clone | Homo sapiens | 37,217 | 23-Nov-99 |
| | | | | | RP5-1096J16, *** SEQUENCING IN PROGRESS ***, in | | | |
| | | | | | unordered pieces. | | | |
| rxa00258 | 795 | GB_PR3: HSJ747H23 | 114201 | AL049699 | Human DNA sequence from clone 747H23 | Homo sapiens | 36,469 | 23-Nov-99 |
| | | | | | on chromosome 6q13-15. Contains the 3′ part of the | | | |
| | | | | | ME1 gene for malic enzyme 1, soluble (NADP-dependent | | | |
| | | | | | malic enzyme, malate oxidoreductase, EC | | | |
| | | | | | 1.1.1.40), a novel gene and the 5′ part of the | | | |
| | | | | | gene for N-acetylglucosamine-phosphate mutase. | | | |
| | | | | | Contains ESTs, STSs, GSSs and two putative CpG islands, | | | |
| | | | | | complete sequence. | | | |
| | | GB_HTG2: HSJ202D23 | 175496 | AL121716 | Homo sapiens chromosome 6 clone RP1-202D23 | Homo sapiens | 36,469 | 03-DEC-1999 |
| | | | | | map q14.1-15, *** SEQUENCING IN PROGRESS | | | |
| | | | | | ***, in unordered pieces. | | | |
| | | GB_HTG2: HSJ202D23 | 175496 | AL121716 | Homo sapiens chromosome 6 clone RP1-202D23 map | Homo sapiens | 36,469 | 03-DEC-1999 |
| | | | | | q14.1-15, *** SEQUENCING IN PROGRESS | | | |
| | | | | | ***, in unordered pieces. | | | |
| rxa00260 | 1299 | GB_PR3: HS360B4 | 23388 | AL031716 | Human DNA sequence from clone 360B4 on | Homo sapiens | 36,145 | 23-Nov-99 |
| | | | | | chromosome 16. Contains part of a gene for a | | | |
| | | | | | PUTATIVE novel protein similar to predicted bacterial and | | | |
| | | | | | worm proteins and ESTs, complete sequence. | | | |
| | | GB_EST19: AA741904 | 423 | AA741904 | LmLv39p3/71A Leishmania major promastigote full | Leishmania major | 39,192 | 10-DEC-1998 |
| | | | | | length cDNA library from early logarithmic stage | | | |
| | | | | | (day 3) Leishmania major cDNA clone 71A 5′, mRNA sequence. | | | |
| | | GB_PR3: HS360B4 | 23388 | AL031716 | Human DNA sequence from clone 360B4 on | Homo sapiens | 39,494 | 23-Nov-99 |
| | | | | | chromosome 16. Contains part of a gene for a | | | |
| | | | | | PUTATIVE novel protein similar to predicted bacterial and | | | |
| | | | | | worm proteins and ESTs, complete sequence. | | | |
| rxa00264 | | | | | | | | |
| rxa00267 | 441 | GB_GSS10: AQ258013 | 761 | AQ258013 | nbxb0019H05f CUGI Rice BAC Library Oryza sativa genomic clone | Oryza sativa | 52,033 | 23-OCT-1998 |
| | | | | | nbxb0019H05f, genomic survey sequence. | | | |
| | | GB_EST10: AA167894 | 552 | AA167894 | CpEST.021 uniZAPCpIOWAsporoLib1 | Cryptosporidium parvum | 40,462 | 19-DEC-1996 |
| | | | | | Cryptosporidium parvum cDNA 5′ similar to lactate | | | |
| | | | | | dehydrogenase, mRNA sequence. | | | |
| | | GB_HTG3: AC011591 | 129431 | AC011591 | Homo sapiens chromosome 17 clone 118_B_18 | Homo sapiens | 35,469 | 07-OCT-1999 |
| | | | | | map 17, *** SEQUENCING IN PROGRESS ***, 25 | | | |
| | | | | | unordered pieces. | | | |
| rxa00271 | 1113 | GB_PL1: CHTRP1 | 3480 | X70035 | C. heterostrophus gene for trifunctional tryptophan synthase. | Cochliobolus | 41,636 | 31-OCT-1996 |
| | | | | | | heterostrophus | | |
| | | GB_VI: FLU47643 | 1492 | U47643 | Feline leukemia virus Notch2 gene, | Feline leukemia virus | 37,869 | 25-OCT-1996 |
| | | | | | clone FeLV/Notch2-AP (subgenomic), partial cds. | | | |
| | | GB_VI: FLU47644 | 1641 | U47644 | Feline leukemia virus Notch2 gene, | Feline leukemia virus | 36,441 | 25-OCT-1996 |
| | | | | | clone FeLV/Notch2-B, partial cds. | | | |
| rxa00272 | 495 | GB_GSS8: AQ041841 | 373 | AQ041841 | CIT-HSP-2335L1.TR CIT-HSP Homo sapiens genomic | Homo sapiens | 45,455 | 14-Jul-98 |
| | | | | | clone 2335L1, genomic survey sequence. | | | |
| | | GB_GSS13: AQ429301 | 591 | AQ429301 | CITBI-E1-2562H16.TR CITBI-E1 Homo sapiens genomic | Homo sapiens | 63,636 | 24-MAR-1999 |
| | | | | | clone 2562H16, genomic survey sequence. | | | |
| | | GB_GSS10: AQ237541 | 667 | AQ237541 | RPCI11-61O21.TJB.1 RPCI-11 Homo sapiens genomic | Homo sapiens | 62,222 | 21-Apr-99 |
| | | | | | clone RPCI-11-61O21, genomic survey sequence. | | | |
| rxa00273 | 1236 | GB_BA1: CGBETPGEN | 2339 | X93514 | C. glutamicum betP gene. | Corynebacterium | 44,056 | 8-Sep-97 |
| | | | | | | glutamicum | | |
| | | GB_PR2: HS142F18 | 141672 | AL031073 | Human DNA sequence from clone 142F18 on chromosome | Homo sapiens | 44,643 | 23-Nov-99 |
| | | | | | Xq26.3-27.2 Contains part of a gene | | | |
| | | | | | similar to melanoma-associated antigen, EST, | | | |
| | | | | | GSS and an inverted repeat, complete sequence. | | | |
| | | GB_IN2: AC007177 | 101320 | AC007177 | Drosophila melanogaster, chromosome 2R, | Drosophila melanogaster | 36,721 | 27-MAR-1999 |
| | | | | | region 59C1-59C5, P1 clones DS06621 and DS02186, | | | |
| | | | | | complete sequence. | | | |
| rxa00274 | 2733 | GB_HTG3: AC011675 | 98026 | AC011675 | Homo sapiens clone 10_J_17, | Homo sapiens | 35,405 | 10-OCT-1999 |
| | | | | | LOW-PASS SEQUENCE SAMPLING. | | | |
| | | GB_HTG3: AC011675 | 98026 | AC011675 | Homo sapiens clone 10_J_17, | Homo sapiens | 35,405 | 10-OCT-1999 |
| | | | | | LOW-PASS SEQUENCE SAMPLING. | | | |
| | | GB_HTG3: AC010598 | 174019 | AC010598 | Homo sapiens chromosome 5 clone CIT-HSPC_560O9, | Homo sapiens | 36,908 | 16-Sep-99 |
| | | | | | *** SEQUENCING IN PROGRESS ***, 50 | | | |
| | | | | | unordered pieces. | | | |
| rxa00275 | 582 | GB_GSS14: AQ574926 | 666 | AQ574926 | nbxb0086K14f CUGI Rice BAC Library Oryza sativa genomic | Oryza sativa | 33,830 | 2-Jun-99 |
| | | | | | clone nbxb0086K14f, genomic survey sequence. | | | |
| | | GB_HTG2: AC004396 | 43686 | AC004396 | Homo sapiens, | Homo sapiens | 38,298 | 19-Jul-99 |
| | | | | | *** SEQUENCING IN PROGRESS ***, 2 unordered pieces. | | | |
| | | GB_HTG2: AC004396 | 43686 | AC004396 | Homo sapiens, | Homo sapiens | 38,298 | 19-Jul-99 |
| | | | | | *** SEQUENCING IN PROGRESS ***, 2 unordered pieces. | | | |
| rxa00276 | 465 | GB_PL1: SC9952X | 29286 | Z49212 | S. cerevisiae chromosome XIII cosmid 9952. | Saccharomyces cerevisiae | 37,118 | 11-Aug-97 |
| | | GB_PL1: S45357 | 4017 | S45357 | PSE-1 = protein secretion enhancer | Saccharomyces cerevisiae | 41,394 | 08-MAY-1993 |
| | | | | | [Saccharomyces cerevisiae, Genomic, 4017 nt]. | | | |
| | | GB_PL1: SCPSE1G | 4017 | Z11538 | S. cerevisiae PSE-1 gene. | Saccharomyces cerevisiae | 41,394 | 13-Aug-96 |
| rxa00279 | 1509 | GB_HTG3: AC009911 | 99707 | AC009911 | Drosophila melanogaster chromosome 2 | Drosophila melanogaster | 33,023 | 05-OCT-1999 |
| | | | | | clone BACR01N17 (D1036) RPCI-98 01.N.17 map 38A-38A | | | |
| | | | | | strain y; cn bw sp, *** SEQUENCING IN PROGRESS | | | |
| | | | | | ***, 69 unordered pieces. | | | |
| | | GB_HTG3: AC009911 | 99707 | AC009911 | Drosophila melanogaster chromosome 2 clone BACR01N17 | Drosophila melanogaster | 33,023 | 05-OCT-1999 |
| | | | | | (D1036) RPCI-98 01.N.17 map 38A-38A | | | |
| | | | | | strain y; cn bw sp, *** SEQUENCING IN | | | |
| | | | | | PROGRESS ***, 69 unordered pieces. | | | |
| | | GB_HTG4: AC008397 | 230451 | AC008397 | Homo sapiens chromosome 19 clone CIT-HSPC_251H24, | Homo sapiens | 37,432 | 31-OCT-1999 |
| | | | | | *** SEQUENCING IN PROGRESS ***, | | | |
| | | | | | 81 unordered pieces. | | | |
| rxa00282 | 889 | GB_PR3: HSB11B7 | 37290 | Z82171 | Human DNA sequence from cosmid B11B7 on | Homo sapiens | 35,845 | 23-Nov-99 |
| | | | | | chromosome 22 contains ESTs. | | | |
| | | GB_PR3: HSB11B7 | 37290 | Z82171 | Human DNA sequence from cosmid B11B7 on chromosome 22 contains ESTs. | Homo sapiens | 37,126 | 23-Nov-99 |
| | | GB_RO: RATMTA | 4197 | L39264 | Rattus norvegicus beta-2 adrenergic receptor gene, | Rattus norvegicus | 41,259 | 23-Feb-96 |
| | | | | | complete cds and promoter region. | | | |
| rxa00283 | 1155 | GB_GSS8: AQ030327 | 411 | AQ030327 | HS_2177_B1_H06_MF CIT Approved Human | Homo sapiens | 37,656 | 1-Jul-98 |
| | | | | | Genomic Sperm Library D Homo sapiens genomic | | | |
| | | | | | clone Plate = 2177 Col = 11 Row = P, | | | |
| | | | | | genomic survey sequence. | | | |
| | | GB_PR3: HSL118GB | 27858 | Z68883 | Human DNA sequence from cosmid L118G10, Huntington's | Homo sapiens | 37,412 | 23-Nov-99 |
| | | | | | Disease Region, chromosome 4p16.3. | | | |
| | | GB_PR3: HSJ513G18 | 110770 | AL109760 | Human DNA sequence from clone 513G18 on chromosome 4, complete sequence. | Homo sapiens | 37,412 | 23-Nov-99 |
| rxa00286 | 687 | GB_EST10: AA157040 | 414 | AA157040 | zo51c05.r1 Stratagene endothelial cell 937223 Homo sapiens cDNA | Homo sapiens | 37,136 | 11-DEC-1996 |
| | | | | | clone IMAGE: 590408 5′ similar to gb: M84711 | | | |
| | | | | | 40S RIBOSOMAL PROTEIN S3A (HUMAN);, mRNA sequence. | | | |
| | | GB_EST11: AA213935 | 629 | AA213935 | zn57a04.r1 Stratagene muscle 937209 Homo sapiens cDNA | Homo sapiens | 34,219 | 1-Aug-97 |
| | | | | | clone IMAGE: 562254 5′ similar to | | | |
| | | | | | gb: M84711 40S RIBOSOMAL PROTEIN S3A (HUMAN);, mRNA sequence. | | | |
| | | GB_STS: BLYBG | 459 | L43987 | Hordeum vulgare (clone ABG380) chromosome 4H, 6H, | Hordeum vulgare | 37,786 | 27-Jul-95 |
| | | | | | 7H STS mRNA, sequence tagged site. | | | |
| rxa00294 | 552 | GB_PR2: HSAC000121 | 93163 | AC000121 | Human BAC clone RG249A12 from 7q22, complete sequence. | Homo sapiens | 36,735 | 31-Jan-97 |
| | | GB_BA2: CGU31281 | 1614 | U31281 | Corynebacterium glutamicum biotin synthase (bioB) gene, complete cds. | Corynebacterium | 100,000 | 21-Nov-96 |
| | | | | | | glutamicum | | |
| | | GB_PR2: HSAC000121 | 93163 | AC000121 | Human BAC clone RG249A12 from 7q22, complete sequence. | Homo sapiens | 37,662 | 31-Jan-97 |
| rxa00297 | 1035 | GB_HTG2: AC006938 | 82665 | AC006938 | Drosophila melanogaster chromosome 2 clone DS01630 | Drosophila melanogaster | 37,241 | 2-Aug-99 |
| | | | | | (D506) map 60C7-60C8 strain y; cn bw sp, | | | |
| | | | | | *** SEQUENCING IN PROGRESS ***, 9 unordered pieces. | | | |
| | | GB_HTG2: AC007116 | 25478 | AC007116 | Drosophila melanogaster chromosome 2 clone DS04467 (D447) | Drosophila melanogaster | 38,630 | 30-Jul-99 |
| | | | | | map 60C6-60C8 strain y; cn bw sp, | | | |
| | | | | | *** SEQUENCING IN PROGRESS ***, 5 unordered pieces. | | | |
| | | GB_HTG2: AC006938 | 82665 | AC006938 | Drosophila melanogaster chromosome 2 clone DS01630 (D506) | Drosophila melanogaster | 37,241 | 2-Aug-99 |
| | | | | | map 60C7-60C8 strain y; cn bw sp, | | | |
| | | | | | *** SEQUENCING IN PROGRESS ***, 9 unordered pieces. | | | |
| rxa00320 | 303 | GB_GSS14: AQ585202 | 564 | AQ585202 | RPCI-11-451L11.TJ RPCI-11 Homo sapiens genomic | Homo sapiens | 37,319 | 7-Jun-99 |
| | | | | | clone RPCI-11-451L11, genomic survey | | | |
| | | | | | sequence. | | | |
| | | GB_BA1: NGPILC1 | 3144 | Y13022 | N. gonorrhoeae pilC1 gene, strain 640. | Neisseria gonorrhoeae | 38,667 | 07-OCT-1997 |
| | | GB_BA1: NGPILC1 | 3144 | Y13022 | N. gonorrhoeae pilC1 gene, strain 640. | Neisseria gonorrhoeae | 36,000 | 07-OCT-1997 |
| rxa00321 | | | | | | | | |
| rxa00322 | 1227 | GB_HTG2: AC007533 | 153053 | AC007533 | Homo sapiens chromosome 16 clone 474B12, | Homo sapiens | 39,469 | 12-MAY-1999 |
| | | | | | *** SEQUENCING IN PROGRESS ***, 5 ordered | | | |
| | | | | | pieces. | | | |
| | | GB_HTG2: AC007533 | 153053 | AC007533 | Homo sapiens chromosome 16 clone 474B12, | Homo sapiens | 39,469 | 12-MAY-1999 |
| | | | | | *** SEQUENCING IN PROGRESS ***, 5 ordered | | | |
| | | | | | pieces. | | | |
| | | GB_PR2: HUM133K23 | 82512 | AC000061 | Human BAC clone 133K23 from 7q31.2, complete sequence. | Homo sapiens | 38,950 | 14-Nov-96 |
| rxa00325 | 768 | GB_BA2: CDU73860 | 1273 | U73860 | Corynebacterium diphtheriae heme oxygenase | Corynebacterium | 52,604 | 7-Feb-97 |
| | | | | | homolog (hmuO) gene, complete cds. | | | |
| | | | | | | diphtheriae | | |
| | | GB_BA1: AB019621 | 652 | AB019621 | Corynebacterium diphtheriae mRNA for Heme oxygenase, complete cds. | Corynebacterium | 55,675 | 31-Jul-99 |
| | | | | | | diphtheriae | | |
| | | GB_EST23: AI096171 | 554 | AI096171 | 28 EcoRI Rice Etiolated Leaf cDNA Library | Oryza sativa | 38,536 | 19-Aug-98 |
| | | | | | Oryza sativa cDNA clone RZ513, mRNA sequence. | | | |
| rxa00326 | 603 | GB_PH: MYP4CG | 11624 | X51522 | Bacteriophage P4 complete DNA genome. | Bacteriophage P4 | 40,577 | 17-Feb-97 |
| | | GB_PH: MYP4ALPH | 3063 | X05623 | Bacteriophage P4 alpha gene and cis replication region crr. | Bacteriophage P4 | 38,640 | 12-Sep-93 |
| | | GB_IN1: CEF22B3 | 30480 | Z68336 | Caenorhabditis elegans cosmid F22B3, complete sequence. | Caenorhabditis elegans | 39,012 | 2-Sep-99 |
| rxa00334 | 459 | GB_BA1: CGGLNA | 3686 | Y13221 | Corynebacterium glutamicum glnA gene. | Corynebacterium | 37,640 | 28-Aug-97 |
| | | | | | | glutamicum | | |
| | | GB_GSS10: AQ248516 | 259 | AQ248516 | T5J22-Sp6 TAMU Arabidopsis thaliana genomic | Arabidopsis thaliana | 38,525 | 06-OCT-1998 |
| | | | | | clone T5J22, genomic survey sequence. | | | |
| | | GB_BA1: CGGLNA | 3686 | Y13221 | Corynebacterium glutamicum glnA gene. | Corynebacterium | 40,487 | 28-Aug-97 |
| | | | | | | glutamicum | | |
| rxa00336 | 594 | GB_BA1: CGGLNA | 3686 | Y13221 | Corynebacterium glutamicum glnA gene. | Corynebacterium | 34,797 | 28-Aug-97 |
| | | | | | | glutamicum | | |
| | | GB_OV: XLFIMB1GN | 7026 | X95549 | X. laevis FIM-B.1 gene. | Xenopus laevis | 33,217 | 13-Feb-97 |
| | | GB_BA1: CGGLNA | 3686 | Y13221 | Corynebacterium glutamicum glnA gene. | Corynebacterium | 37,371 | 28-Aug-97 |
| | | | | | | glutamicum | | |
| rxa00337 | 1173 | GB_BA1: CGU43536 | 3464 | U43536 | Corynebacterium glutamicum heat shock, ATP-binding | Corynebacterium | 36,406 | 13-MAR-1997 |
| | | | | | protein (clpB) gene, complete cds. | | | |
| | | | | | | glutamicum | | |
| | | GB_BA1: CGAJ4934 | 1160 | AJ004934 | Corynebacterium glutamicum dapD gene, complete CDS. | Corynebacterium | 39,734 | 17-Jun-98 |
| | | | | | | glutamicum | | |
| | | GB_EST37: AI944838 | 396 | AI944838 | bs06a08.y1 Drosophila melanogaster adult testis | Drosophila melanogaster | 37,626 | 17-Aug-99 |
| | | | | | library Drosophila melanogaster cDNA clone | | | |
| | | | | | bs06a08 5′, mRNA sequence. | | | |
| rxa00338 | 1263 | GB_BA1: BLTRP | 7725 | X04960 | Brevibacterium lactofermentum tryptophan operon. | Corynebacterium | 39,790 | 10-Feb-99 |
| | | | | | | glutamicum | | |
| | | GB_PAT: E01688 | 7725 | E01688 | Genomic DNA of trp operon of prepibacterium latophelmentamn. | unidentified | 39,871 | 29-Sep-97 |
| | | GB_PAT: E01375 | 7726 | E01375 | DNA sequence of tryptophan operon. | Corynebacterium | 39,871 | 29-Sep-97 |
| | | | | | | glutamicum | | |
| rxa00339 | 840 | GB_VI: OPU75930 | 131993 | U75930 | Orgyia pseudotsugata nuclear polyhedrosis virus complete genome. | Orgyia pseudotsugata | 38,264 | 06-MAR-1998 |
| | | | | | | nuclear polyhedrosis virus | | |
| | | GB_VI: OPU75930 | 131993 | U75930 | Orgyia pseudotsugata nuclear polyhedrosis virus complete genome. | Orgyia pseudotsugata | 38,620 | 06-MAR-1998 |
| | | | | | | nuclear polyhedrosis virus | | |
| | | GB_HTG3: AC008340 | 126593 | AC008340 | Drosophila melanogaster chromosome 2 clone BACR07J20 | Drosophila melanogaster | 38,193 | 6-Aug-99 |
| | | | | | (D918) RPCI-98 07.J.20 map 42D-42E | | | |
| | | | | | strain y; cn bw sp, *** SEQUENCING IN | | | |
| | | | | | PROGRESS ***, 92 unordered pieces. | | | |
| rxa00342 | 552 | GB_EST34: AI794353 | 636 | AI794353 | fc43d12.y1 Zebrafish WashU MPIMG EST Danio rerio cDNA | Danio rerio | 40,283 | 2-Jul-99 |
| | | | | | 5′ similar to TR: Q62868 Q62868 ROK- | | | |
| | | | | | ALPHA.;, mRNA sequence. | | | |
| | | GB_PR2: U73635 | 33676 | U73635 | Human Chromosome 11 Cosmid cSRL156b6, complete sequence. | Homo sapiens | 39,366 | 25-Jul-97 |
| | | GB_PR2: U73635 | 33676 | U73635 | Human Chromosome 11 Cosmid cSRL156b6, complete sequence. | Homo sapiens | 37,970 | 25-Jul-97 |
| rxa00344 | 1002 | GB_HTG2: HS312E8 | 33595 | AL032819 | Homo sapiens chromosome 16 clone LA16-312E8, | Homo sapiens | 40,415 | 03-DEC-1999 |
| | | | | | *** SEQUENCING IN PROGRESS ***, in | | | |
| | | | | | unordered pieces. | | | |
| | | GB_HTG2: HS312E8 | 33595 | AL032819 | Homo sapiens chromosome 16 clone LA16-312E8, | Homo sapiens | 40,415 | 03-DEC-1999 |
| | | | | | *** SEQUENCING IN PROGRESS ***, in | | | |
| | | | | | unordered pieces. | | | |
| | | GB_OM: BOVINOPHOS | 1573 | M55916 | Bovine inositol polyphosphate 1-phosphatase | Bos taurus | 38,420 | 27-Apr-93 |
| | | | | | (inositol polyphosphate 1-phosphatase gene) mRNA, | | | |
| | | | | | complete cds. | | | |
| rxa00349 | 1590 | GB_PR3: HS353E16 | 189765 | AL031591 | Human DNA sequence from clone 353E16 on | Homo sapiens | 34,766 | 23-Nov-99 |
| | | | | | chromosome 22q11.22-12.3, complete sequence. | | | |
| | | GB_HTG2: AC005059 | 170128 | AC005059 | Homo sapiens clone RG074A24, *** SEQUENCING | Homo sapiens | 37,011 | 13-MAR-1999 |
| | | | | | IN PROGRESS ***, 25 unordered pieces. | | | |
| | | GB_HTG2: AC005059 | 170128 | AC005059 | Homo sapiens clone RG074A24, | Homo sapiens | 37,011 | 13-MAR-1999 |
| | | | | | *** SEQUENCING IN PROGRESS ***, 25 unordered pieces. | | | |
| rxa00353 | 816 | GB_BA1: D87976 | 2352 | D87976 | Brevibacterium lactofermentum DNA for D-2-hydroxyisocaproate | Corynebacterium | 39,290 | 7-Feb-99 |
| | | | | | dehydrogenase (ddh), complete cds. | glutamicum | | |
| | | GB_BA1: CGDDH | 1829 | Y00151 | Corynebacterium glutamicum ddh gene for | Corynebacterium | 39,342 | 12-Sep-93 |
| | | | | | meso-diaminopimelate D-dehydrogenase (EC 1.4.1.16). | glutamicum | | |
| | | GB_BA1: CGDDH | 1829 | Y00151 | Corynebacterium glutamicum ddh gene for | Corynebacterium | 38,624 | 12-Sep-93 |
| | | | | | meso-diaminopimelate D-dehydrogenase (EC 1.4.1.16). | glutamicum | | |
| rxa00355 | 1143 | GB_BA1: CGDDH | 1829 | Y00151 | Corynebacterium glutamicum ddh gene for | Corynebacterium | 100,000 | 12-Sep-93 |
| | | | | | meso-diaminopimelate D-dehydrogenase (EC 1.4.1.16). | glutamicum | | |
| | | GB_BA1: D87976 | 2352 | D87976 | Brevibacterium lactofermentum DNA for | Corynebacterium | 98,411 | 7-Feb-99 |
| | | | | | D-2-hydroxyisocaproate dehydrogenase (ddh), complete cds. | glutamicum | | |
| | | GB_PAT: E14511 | 1034 | E14511 | DNA encoding Brevibacterium | Corynebacterium | 100,000 | 28-Jul-99 |
| | | | | | diaminopimelic acid dehydrogenase. | glutamicum | | |
| rxa00362 | 1470 | GB_HTG4: AC009043 | 170748 | AC009043 | Homo sapiens chromosome 16 clone RPCI-11_184F14, | Homo sapiens | 37,337 | 31-OCT-1999 |
| | | | | | *** SEQUENCING IN PROGRESS ***, 122 unordered pieces. | | | |
| | | GB_HTG4: AC009043 | 170748 | AC009043 | Homo sapiens chromosome 16 clone RPCI-11_184F14, | Homo sapiens | 37,337 | 31-OCT-1999 |
| | | | | | *** SEQUENCING IN PROGRESS ***, 122 unordered pieces. | | | |
| | | GB_PR4: HSZO2TJP09 | 811 | AF177521 | Homo sapiens tight junction protein ZO-2 (TJP2) gene, exons 8 and 9. | Homo sapiens | 40,758 | 28-Sep-99 |
| rxa00373 | 439 | GB_PAT: AR004983 | 2277 | AR004983 | Sequence 5 from patent U.S. Pat. No. 5747317. | Unknown. | 41,638 | 04-DEC-1998 |
| | | GB_EST37: AI967505 | 380 | AI967505 | Ljirnpest03-215-c10 Ljirnp Lambda HybriZap two-hybrid library | Lotus japonicus | 45,882 | 24-Aug-99 |
| | | | | | Lotus japonicus cDNA clone LP215-03-c10 5′ | | | |
| | | | | | similar to 60S ribosomal protein L39, mRNA sequence. | | | |
| | | GB_EST27: AI399460 | 670 | AI399460 | NCSP4F6T7 Subtracted Perithecial Neurospora crassa cDNA | Neurospora crassa | 38,571 | 8-Feb-99 |
| | | | | | clone SP4F6 3′, mRNA sequence. | | | |
| rxa00375 | 624 | GB_IN2: AC004445 | 61852 | AC004445 | Drosophila melanogaster DNA sequence | Drosophila melanogaster | 37,236 | 01-MAY-1998 |
| | | | | | (P1 DS00445 (D93)), complete sequence. | | | |
| | | GB_HTG6: AC011694 | 160557 | AC011694 | Homo sapiens clone RP11-19D19, | Homo sapiens | 34,087 | 03-DEC-1999 |
| | | | | | *** SEQUENCING IN PROGRESS ***, 33 unordered pieces. | | | |
| | | GB_HTG6: AC011694 | 160557 | AC011694 | Homo sapiens clone RP11-19D19, | Homo sapiens | 40,523 | 03-DEC-1999 |
| | | | | | *** SEQUENCING IN PROGRESS ***, 33 unordered pieces. | | | |
| rxa00380 | 744 | GB_BA1: COXHSPAB | 2302 | M20482 | C. burnetii heat shock operon encoding two heat | Coxiella burnetii | 37,788 | 26-Apr-93 |
| | | | | | shock proteins (htpA and htpB), complete cds. | | | |
| | | GB_RO: CBGPIMR | 1735 | Z37977 | C. barabensis (griseus) mRNA for glucose phosphate isomerase. | Cricetulus griseus | 37,823 | 14-Sep-95 |
| | | GB_GSS10: AQ172617 | 505 | AQ172617 | HS_3197_A2_G09_T7 CIT Approved Human Genomic | Homo sapiens | 37,580 | 17-OCT-1998 |
| | | | | | Sperm Library D Homo sapiens genomic | | | |
| | | | | | clone Plate = 3197 Col = 18 Row = M, genomic survey sequence. | | | |
| rxa00387 | 978 | GB_BA1: MTY25D10 | 40838 | Z95558 | Mycobacterium tuberculosis H37Rv | Mycobacterium | 60,477 | 17-Jun-98 |
| | | | | | complete genome; segment 28/162. | tuberculosis | | |
| | | GB_BA1: MSGY224 | 40051 | AD000004 | Mycobacterium tuberculosis sequence from clone y224. | Mycobacterium | 60,270 | 03-DEC-1996 |
| | | | | | | tuberculosis | | |
| | | GB_BA1: U00018 | 42991 | U00018 | Mycobacterium leprae cosmid B2168. | Mycobacterium leprae | 37,913 | 01-MAR-1994 |
| rxa00390 | 528 | GB_IN1: DMU29153 | 8230 | U29153 | Drosophila melanogaster nudel (ndl) mRNA, complete cds. | Drosophila melanogaster | 36,190 | 08-DEC-1995 |
| | | GB_IN1: DMU29153 | 8230 | U29153 | Drosophila melanogaster nudel (ndl) mRNA, complete cds. | Drosophila melanogaster | 37,202 | 08-DEC-1995 |
| rxa00392 | 987 | GB_IN2: AE001274 | 268984 | AE001274 | Leishmania major chromosome 1, complete sequence. | Leishmania major | 37,885 | 24-MAR-1999 |
| | | GB_EST11: AA270543 | 516 | AA270543 | va68h06.r1 Soares mouse 3NME12 5 | Mus musculus | 40,546 | 26-MAR-1997 |
| | | | | | Mus musculus cDNA clone IMAGE: 736571 5′, mRNA sequence. | | | |
| | | GB_IN2: AE001274 | 268984 | AE001274 | Leishmania major chromosome 1, complete sequence. | Leishmania major | 36,103 | 24-MAR-1999 |
| rxa00394 | 456 | GB_GSS9: AQ158990 | 728 | AQ158990 | nbxb0012L11r CUGI Rice BAC Library Oryza sativa genomic | Oryza sativa | 41,463 | 12-Sep-98 |
| | | | | | clone nbxb0012L11r, genomic survey sequence. | | | |
| | | GB_GSS12: AQ342952 | 761 | AQ342952 | RPCI11-122O15.TV RPCI-11 Homo sapiens genomic | Homo sapiens | 37,556 | 07-MAY-1999 |
| | | | | | clone RPCI-11-122O15, genomic survey sequence. | | | |
| | | GB_GSS9: AQ158990 | 728 | AQ158990 | nbxb0012L11r CUGI Rice BAC Library Oryza sativa genomic | Oryza sativa | 37,923 | 12-Sep-98 |
| | | | | | clone nbxb0012L11r, genomic survey sequence. | | | |
| rxa00395 | 423 | GB_PR2: HS1052M9 | 134245 | AL022718 | Human DNA sequence from clone 1052M9 on chromosome Xq25. | Homo sapiens | 43,564 | 23-Nov-99 |
| | | | | | Contains the SH2D1A gene for | | | |
| | | | | | SH2 domain protein 1A, Duncan's disease | | | |
| | | | | | (lymphoproliferative syndrome) (DSHP), part of a 60S | | | |
| | | | | | Acidic Ribosomal protein 1 (RPLP1) LIKE gene and | | | |
| | | | | | part of a mouse DOC4 LIKE gene. Contains | | | |
| | | | | | ESTs and GSSs, complete sequence. | | | |
| | | GB_BA2: RCPHSYNG | 45959 | Z11165 | R. capsulatus complete photosynthesis gene cluster. | Rhodobacter capsulatus | 36,930 | 2-Sep-99 |
| | | GB_PR2: HS1052M9 | 134245 | AL022718 | Human DNA sequence from clone 1052M9 on chromosome Xq25. | Homo sapiens | 33,981 | 23-Nov-99 |
| | | | | | Contains the SH2D1A gene for | | | |
| | | | | | SH2 domain protein 1A, Duncan's disease | | | |
| | | | | | (lymphoproliferative syndrome) (DSHP), part of a 60S | | | |
| | | | | | Acidic Ribosomal protein 1 (RPLP1) LIKE gene and | | | |
| | | | | | part of a mouse DOC4 LIKE gene. Contains | | | |
| | | | | | ESTs and GSSs, complete sequence. | | | |
| rxa00396 | 594 | GB_PL2: AC002311 | 85855 | AC002311 | Arabidopsis thaliana chromosome I BAC | Arabidopsis thaliana | 38,957 | 4-Feb-98 |
| | | | | | T26J12 genomic sequence, complete sequence. | | | |
| | | GB_PL2: AC002311 | 85855 | AC002311 | Arabidopsis thaliana chromosome I BAC T26J12 | Arabidopsis thaliana | 36,300 | 4-Feb-98 |
| | | | | | genomic sequence, complete sequence. | | | |
| rxa00397 | 924 | GB_PL1: HASMT | 27694 | D31785 | Hansenula wingei mitochondrial DNA, complete sequence. | Mitochondrion Pichia | 33,985 | 10-Jun-99 |
| | | | | | | canadensis | | |
| | | GB_PL1: HASMT | 27694 | D31785 | Hansenula wingei mitochondrial DNA, complete sequence. | Mitochondrion Pichia | 33,775 | 10-Jun-99 |
| | | | | | | canadensis | | |
| rxa00398 | 873 | GB_HTG1: CNS01DRT | 222150 | AL118557 | Homo sapiens chromosome 14 clone R-1033H12, | Homo sapiens | 35,417 | 25-Sep-99 |
| | | | | | *** SEQUENCING IN PROGRESS ***, in ordered pieces. | | | |
| | | GB_HTG1: CNS01DRT | 222150 | AL118557 | Homo sapiens chromosome 14 clone R-1033H12, | Homo sapiens | 35,417 | 25-Sep-99 |
| | | | | | *** SEQUENCING IN PROGRESS ***, in ordered pieces. | | | |
| | | GB_HTG1: CNS01DRT | 222150 | AL118557 | Homo sapiens chromosome 14 clone R-1033H12, | Homo sapiens | 38,005 | 25-Sep-99 |
| | | | | | *** SEQUENCING IN PROGRESS ***, in ordered pieces. | | | |
| rxa00399 | 438 | GB_IN1: CELC32B5 | 42545 | U80843 | Caenorhabditis elegans cosmid C32B5. | Caenorhabditis elegans | 36,468 | 05-DEC-1996 |
| | | GB_IN1: CELC32B5 | 42545 | U80843 | Caenorhabditis elegans cosmid C32B5. | Caenorhabditis elegans | 40,000 | 05-DEC-1996 |
| rxa00408 | 570 | GB_PR4: AC005940 | 158414 | AC005940 | Homo sapiens chromosome 17, clone | Homo sapiens | 35,219 | 18-MAR-1999 |
| | | | | | hRPK.167_N_20, complete sequence. | | | |
| | | GB_PR1: HSSERCA11 | 3050 | Y15726 | Homo sapiens SERCA3 gene, exons 11-14. | Homo sapiens | 35,036 | 30-Jun-98 |
| | | GB_PR4: AC005940 | 158414 | AC005940 | Homo sapiens chromosome 17, clone | Homo sapiens | 36,926 | 18-MAR-1999 |
| | | | | | hRPK.167_N_20, complete sequence. | | | |
| rxa00409 | 1536 | GB_PR1: HSSERCA11 | 3050 | Y15726 | Homo sapiens SERCA3 gene, exons 11-14. | Homo sapiens | 38,555 | 30-Jun-98 |
| | | GB_PR4: AC005940 | 158414 | AC005940 | Homo sapiens chromosome 17, clone hRPK.167_N_20, complete sequence. | Homo sapiens | 36,370 | 18-MAR-1999 |
| | | GB_PR3: HS591B8 | 142552 | AL035410 | Human DNA sequence from clone 591B8 on chromosome 1p13.1, complete sequence. | Homo sapiens | 35,891 | 23-Nov-99 |
| rxa00411 | 798 | GB_BA1: AP000003 | 233000 | AP000003 | Pyrococcus horikoshii OT3 | Pyrococcus horikoshii | 36,849 | 8-Feb-99 |
| | | | | | genomic DNA, 544001-777000 nt. position (3/7). | | | |
| | | GB_PL2: F25A4 | 115721 | AC008263 | Arabidopsis thaliana chromosome 1 BAC F25A4 sequence, | Arabidopsis thaliana | 37,628 | 15-Sep-99 |
| | | | | | complete sequence. | | | |
| | | GB_PR3: HS413H6 | 142599 | AL022724 | Human DNA sequence from clone 413H6 on chromosome | Homo sapiens | 36,755 | 23-Nov-99 |
| | | | | | 6p22.3-24.3. Contains a hamster | | | |
| | | | | | Androgen-dependent Expressed Protein like protein gene, | | | |
| | | | | | ESTs and GSSs, complete sequence. | | | |
| rxa00416 | 1673 | GB_EST8: C10137 | 360 | C10137 | C10137 Yuji Kohara unpublished cDNA: Strain | Caenorhabditis elegans | 35,574 | 18-OCT-1999 |
| | | | | | N2 hermaphrodite embryo Caenorhabditis elegans | | | |
| | | | | | cDNA clone yk188a1 5′, mRNA sequence. | | | |
| | | GB_EST36: AV186952 | 376 | AV186952 | AV186952 Yuji Kohara unpublished cDNA: Strain N2 | Caenorhabditis elegans | 36,702 | 22-Jul-99 |
| | | | | | hermaphrodite embryo Caenorhabditis elegans | | | |
| | | | | | cDNA clone yk506a5 5′, mRNA sequence. | | | |
| | | GB_EST16: C48235 | 383 | C48235 | C48235 Yuji Kohara unpublished cDNA: Strain N2 | Caenorhabditis elegans | 42,440 | 18-OCT-1999 |
| | | | | | hermaphrodite embryo Caenorhabditis elegans | | | |
| | | | | | cDNA clone yk459h10 5′, mRNA sequence. | | | |
| rxa00422 | 1017 | GB_BA1: MTCY227 | 35946 | Z77724 | Mycobacterium tuberculosis H37Rv complete genome; segment 114/162. | Mycobacterium | 39,822 | 17-Jun-98 |
| | | | | | | tuberculosis | | |
| | | GB_BA1: MTV023 | 47852 | AL022022 | Mycobacterium tuberculosis H37Rv complete genome; segment 148/162. | Mycobacterium | 39,841 | 17-Jun-98 |
| | | | | | | tuberculosis | | |
| | | GB_PR3: AC003091 | 137817 | AC003091 | Human BAC clone RG326G04 from 7p21, complete sequence. | Homo sapiens | 36,653 | 6-Nov-97 |
| rxa00423 | 576 | GB_BA1: AP000063 | 185300 | AP000063 | Aeropyrum pernix genomic DNA, section 6/7. | Aeropyrum pernix | 38,908 | 22-Jun-99 |
| | | GB_IN1: LDHSP100 | 7726 | Z94053 | L. donovani hsp100 gene. | Leishmanla donovani | 39,646 | 28-Apr-97 |
| | | GB_GSS11: AQ274393 | 572 | AQ274393 | nbxb0035G12r CUGI Rice BAC Library Oryza sativa | Oryza sativa | 35,714 | 3-Nov-98 |
| | | | | | genomic clone nbxb0035G12r, genomic survey sequence. | | | |
| rxa00424 | 594 | GB_BA1: AP000063 | 185300 | AP000063 | Aeropyrum pernix genomic DNA, section 6/7. | Aeropyrum pernix | 38,225 | 22-Jun-99 |
| | | GB_BA1: AP000063 | 185300 | AP000063 | Aeropyrum pernix genomic DNA, section 6/7. | Aeropyrum pernix | 36,735 | 22-Jun-99 |
| | | GB_IN1: LDHSP100 | 7726 | Z94053 | L. donovani hsp100 gene. | Leishmania donovani | 35,125 | 28-Apr-97 |
| rxa00425 | 348 | GB_EST30: AV021214 | 281 | AV021214 | AV021214 Mus musculus 18-day embryo C57BL/6J | Mus musculus | 35,849 | 28-Aug-99 |
| | | | | | Mus musculus cDNA clone 1190021P08, mRNA sequence. | | | |
| | | GB_HTG3: AC009278 | 164119 | AC009278 | Homo sapiens clone 44_J_4, | Homo sapiens | 36,705 | 12-Aug-99 |
| | | | | | *** SEQUENCING IN PROGRESS ***, 14 unordered pieces. | | | |
| | | GB_HTG3: AC009278 | 164119 | AC009278 | Homo sapiens clone 44_J_4, | Homo sapiens | 36,705 | 12-Aug-99 |
| | | | | | *** SEQUENCING IN PROGRESS ***, 14 unordered pieces. | | | |
| rxa00428 | 756 | GB_BA2: AF127082 | 10847 | AF127082 | Myxococcus xanthus ATP-dependent protease | Myxococcus xanthus | 40,995 | 18-MAY-1999 |
| | | | | | proteolytic subunit ClpP (clpP), ATP-dependent | | | |
| | | | | | protease ATPase subunit ClpX (clpX), prolyl | | | |
| | | | | | endopeptidase precursor Pep (pep), ATP-dependent | | | |
| | | | | | protease LonV(lonV), oligopeptide permease | | | |
| | | | | | homolog OppA (oppA), oligopeptide permease | | | |
| | | | | | homolog OppB (oppB), and oligopeptide permease | | | |
| | | | | | homolog OppC (oppC) genes, complete cds. | | | |
| | | GB_PL1: AB017080 | 653 | AB017080 | Porphyra sp. DNA, internal transcribed spacer 1 (ITS1). | Porphyra sp. | 38,491 | 10-Sep-99 |
| | | GB_EST27: AI442425 | 541 | AI442425 | sa26g05.y1 Gm-c1004 Glycine max cDNA | Glycine max | 40,000 | 01-DEC-1999 |
| | | | | | clone GENOME SYSTEMS CLONE ID: Gm-c1004-465 5′ | | | |
| | | | | | similar to SW: NDC1_RABIT Q28615 RENAL | | | |
| | | | | | SODIUM/DICARBOXYLATE COTRANSPORTER;, | | | |
| | | | | | mRNA sequence. | | | |
| rxa00429 | 525 | GB_EST3: R33129 | 440 | R33129 | yh81c08.s1 Soares placenta Nb2HP Homo sapiens cDNA | Homo sapiens | 37,216 | 28-Apr-95 |
| | | | | | clone IMAGE: 136142 3′ similar to | | | |
| | | | | | gb: X53742_rna1 FIBULIN 1, ISOFORM | | | |
| | | | | | B PRECURSOR (HUMAN);, mRNA sequence. | | | |
| | | GB_PH: AF115103 | 40739 | AF115103 | Streptococcus thermophilus bacteriophage Sfi21, complete genome. | Streptococcus | 36,069 | 18-Jul-99 |
| | | | | | | thermophilus | | |
| | | | | | | bacteriophage Sfi21 | | |
| | | GB_PH: AF115102 | 37370 | AF115102 | Streptococcus thermophilus bacteriophage Sfi19, complete genome. | Streptococcus | 36,260 | 18-Jul-99 |
| | | | | | | thermophilus | | |
| | | | | | | bacteriophage Sfi19 | | |
| rxa00430 | 534 | GB_BA1: MSGY126 | 37164 | AD000012 | Mycobacterium tuberculosis sequence from clone y126. | Mycobacterium | 55,491 | 10-DEC-1996 |
| | | | | | | tuberculosis | | |
| | | GB_BA1: MTY13D12 | 37085 | Z80343 | Mycobacterium tuberculosis H37Rv complete genome; segment 156/162. | Mycobacterium | 55,491 | 17-Jun-98 |
| | | | | | | tuberculosis | | |
| | | GB_BA1: MSGB971CS | 37566 | L78821 | Mycobacterium leprae cosmid B971 DNA sequence. | Mycobacterium leprae | 36,905 | 15-Jun-96 |
| rxa00433 | 648 | GB_PR2: AP000073 | 100000 | AP000073 | Homo sapiens genomic DNA, chromosome 8p11.2, | Homo sapiens | 38,043 | 20-Nov-99 |
| | | | | | senescence gene region, section 9/19, complete sequence. | | | |
| | | GB_IN1: CELF29G9 | 42751 | AF016440 | Caenorhabditis elegans cosmid F29G9. | Caenorhabditis elegans | 35,474 | 7-Aug-97 |
| | | GB_BA1: MSGY414A | 40121 | AD000007 | Mycobacterium tuberculosis sequence from clone y414a. | Mycobacterium | 36,809 | 03-DEC-1996 |
| | | | | | | tuberculosis | | |
| rxa00447 | | | | | | | | |
| rxa00451 | 615 | GB_EST26: AI389267 | 643 | AI389267 | GH20396.5prime GH Drosophila melanogaster head | Drosophila melanogaster | 41,085 | 28-Jan-99 |
| | | | | | pOT2 Drosophila melanogaster cDNA clone | | | |
| | | | | | GH20396 5prime, mRNA sequence. | | | |
| | | GB_EST37: AI945493 | 574 | AI945493 | bs13e05.y1 Drosophila melanogaster adult testis library | Drosophila melanogaster | 44,040 | 17-Aug-99 |
| | | | | | Drosophila melanogaster cDNA clone | | | |
| | | | | | bs13e05 5′, mRNA sequence. | | | |
| | | GB_GSS11: AQ288118 | 630 | AQ288118 | nbxb0032I18r CUGI Rice BAC Library Oryza sativa genomic | Oryza sativa | 37,885 | 03-DEC-1998 |
| | | | | | clone nbxb0032I18r, genomic survey sequence. | | | |
| rxa00455 | 873 | GB_IN1: DMOVO | 6655 | X59772 | D. melanogaster ovo gene required for female germ line development. | Drosophila melanogaster | 35,104 | 24-Feb-99 |
| | | GB_EST14: AA390588 | 513 | AA390588 | LD09657.5prime LD Drosophila melanogaster embryo | Drosophila melanogaster | 39,759 | 28-Nov-98 |
| | | | | | BlueScript Drosophila melanogaster cDNA | | | |
| | | | | | clone LD09657 5prime, mRNA sequence. | | | |
| | | GB_EST19: AA801874 | 621 | AA801874 | GM03519.5prime GM Drosophila melanogaster ovary BlueScript | Drosophila melanogaster | 35,437 | 25-Nov-98 |
| | | | | | Drosophila melanogaster cDNA | | | |
| | | | | | clone GM03519 5prime similar to U11383: ovo FBgn0003028 | | | |
| | | | | | PID: g520527 SWISS-PROT: P51521, mRNA sequence. | | | |
| rxa00457 | 1203 | GB_GSS8: AQ000125 | 398 | AQ000125 | CIT-HSP-2282P3.TF CIT-HSP Homo sapiens | Homo sapiens | 41,730 | 26-Jun-98 |
| | | | | | genomic clone 2282P3, genomic survey sequence. | | | |
| | | GB_IN1: DROADDLIKE | 4209 | L14330 | Drosophila melanogaster adducin-like protein, complete cds. | Drosophila melanogaster | 37,795 | 11-Jun-93 |
| | | GB_IN1: DROHTSC | 3922 | L05016 | Drosophila melanogaster hu-li tai shao (hts) mRNA, complete cds. | Drosophila melanogaster | 37,081 | 26-Apr-93 |
| rxa00462 | 1503 | GB_HTG3: AC009210 | 103814 | AC009210 | Drosophila melanogaster chromosome 2 clone | Drosophila melanogaster | 33,356 | 20-Aug-99 |
| | | | | | BACR01I06 (D1054) RPCI-98 01.I.6 map 55D-55D | | | |
| | | | | | strain y; cn bw sp, *** SEQUENCING | | | |
| | | | | | IN PROGRESS ***, 86 unordered pieces. | | | |
| | | GB_HTG3: AC009210 | 103814 | AC009210 | Drosophila melanogaster chromosome 2 clone | Drosophila melanogaster | 33,356 | 20-Aug-99 |
| | | | | | BACR01I06 (D1054) RPCI-98 01.I.6 map 55D-55D | | | |
| | | | | | strain y; cn bw sp, *** SEQUENCING | | | |
| | | | | | IN PROGRESS ***, 86 unordered pieces. | | | |
| | | GB_BA1: SCE9 | 37730 | AL049841 | Streptomyces coelicolor cosmid E9. | Streptomyces coelicolor | 37,308 | 19-MAY-1999 |
| rxa00463 | 945 | GB_BA2: AF052652 | 2096 | AF052652 | Corynebacterium glutamicum homoserine | Corynebacterium | 99,481 | 19-MAR-1998 |
| | | | | | O-acetyltransferase (metA) gene, complete cds. | | | |
| | | | | | | glutamicum | | |
| | | GB_GSS12: AQ407770 | 500 | AQ407770 | HS_5069_B1_F03_T7A RPCI-11 Human Male BAC Library | Homo sapiens | 40,081 | 17-MAR-1999 |
| | | | | | Homo sapiens genomic clone Plate = 645 | | | |
| | | | | | Col = 5 Row = L, genomic survey sequence. | | | |
| | | GB_GSS15: AQ596209 | 358 | AQ596209 | HS_5482_A2_H10_SP6E RPCI-11 Human | Homo sapiens | 40,000 | 8-Jun-99 |
| | | | | | Male BAC Library Homo sapiens genomic clone | | | |
| | | | | | Plate = 1058 Col = 20 Row = O, | | | |
| | | | | | genomic survey sequence. | | | |
| rxa00468 | 942 | GB_EST32: AI763196 | 341 | AI763196 | wi65h04.x1 NCI_CGAP_Kid12 Homo sapiens cDNA | Homo sapiens | 38,824 | 24-Jun-99 |
| | | | | | clone IMAGE: 2398231 3′, mRNA sequence. | | | |
| | | GB_EST17: AA652964 | 329 | AA652964 | ns62e02.s1 NCI_CGAP_Pr22 Homo sapiens cDNA | Homo sapiens | 41,104 | 13-Nov-97 |
| | | | | | clone IMAGE: 1188218 3′, mRNA sequence. | | | |
| | | GB_EST20: AA864303 | 411 | AA864303 | oh54d02.s1 NCI_CGAP_GC4 Homo sapiens cDNA | Homo sapiens | 41,422 | 13-MAY-1998 |
| | | | | | clone IMAGE: 1470435 3′, mRNA sequence. | | | |
| rxa00469 | 1299 | GB_PR4: AC005988 | 173126 | AC005988 | Homo sapiens chromosome 17, clone | Homo sapiens | 34,699 | 15-Jan-99 |
| | | | | | hRPK.299_G_24, complete sequence. | | | |
| | | GB_PR4: AC005988 | 173126 | AC005988 | Homo sapiens chromosome 17, clone | Homo sapiens | 35,725 | 15-Jan-99 |
| | | | | | hRPK.299_G_24, complete sequence. | | | |
| | | GB_HTG3: AC009116 | 186292 | AC009116 | Homo sapiens chromosome 16 clone RPCI-11_477D3, | Homo sapiens | 36,222 | 3-Aug-99 |
| | | | | | *** SEQUENCING IN PROGRESS ***, 47 | | | |
| | | | | | unordered pieces. | | | |
| rxa00472 | 942 | GB_HTG3: AC007882 | 214882 | AC007882 | Homo sapiens clone NH0499D05, | Homo sapiens | 38,245 | 8-Sep-99 |
| | | | | | *** SEQUENCING IN PROGRESS ***, 2 unordered pieces. | | | |
| | | GB_HTG3: AC007882 | 214882 | AC007882 | Homo sapiens clone NH0499D05, | Homo sapiens | 38,245 | 8-Sep-99 |
| | | | | | *** SEQUENCING IN PROGRESS ***, 2 unordered pieces. | | | |
| | | GB_PR2: HUAC002038 | 161973 | AC002038 | Homo sapiens chromosome | Homo sapiens | 37,961 | 30-Jun-97 |
| | | | | | 2 clone 101B6 map 2p11, complete sequence. | | | |
| rxa00473 | 912 | GB_HTG3: AC011445 | 144370 | AC011445 | Homo sapiens chromosome 19 clone CIT-HSPC_246B18, | Homo sapiens | 38,470 | 07-OCT-1999 |
| | | | | | *** SEQUENCING IN PROGRESS ***, 31 unordered pieces. | | | |
| | | GB_HTG3: AC011445 | 144370 | AC011445 | Homo sapiens chromosome 19 clone CIT-HSPC_246B18, | Homo sapiens | 38,470 | 07-OCT-1999 |
| | | | | | *** SEQUENCING IN PROGRESS ***, 31 unordered pieces. | | | |
| | | GB_RO: AB026437 | 2097 | AB026437 | Mus musculus DNA, 5′ flanking region of interleukin 12 receptor beta 1. | Mus musculus | 40,000 | 02-OCT-1999 |
| rxa00474 | 1701 | GB_GSS10: AQ223838 | 543 | AQ223838 | HS_2218_A1_H03_MR CIT Approved | Homo sapiens | 40,189 | 20-Sep-98 |
| | | | | | Human Genomic Sperm Library D Homo sapiens genomic | | | |
| | | | | | clone Plate = 2218 Col = 5 Row = O, genomic survey sequence. | | | |
| | | GB_GSS10: AQ223838 | 543 | AQ223838 | HS_2218_A1_H03_MR CIT Approved Human | Homo sapiens | 37,944 | 20-Sep-98 |
| | | | | | Genomic Sperm Library D Homo sapiens genomic | | | |
| | | | | | clone Plate = 2218 Col = 5 Row = O, genomic survey sequence. | | | |
| rxa00475 | 783 | GB_PL2: GMAKHSDH2 | 10535 | AF049708 | Glycine max aspartokinase-homoserine dehydrogenase (AK-HSDH) gene, partial cds. | Glycine max | 36,446 | 7-Jul-99 |
| | | GB_EST14: AA386651 | 351 | AA386651 | vb54b04.r1 Ko mouse embryo 11 5dpc Mus musculus cDNA | Mus musculus | 41,311 | 23-Apr-97 |
| | | | | | clone IMAGE: 760783 5′, mRNA sequence. | | | |
| | | GB_EST14: AA386603 | 498 | AA386603 | vb53c02.r1 Ko mouse embryo 11 5dpc Mus musculus cDNA | Mus musculus | 40,644 | 23-Apr-97 |
| | | | | | clone IMAGE: 760706 5′ similar to | | | |
| | | | | | TR: G56689 G56689 DIMETHYLGLYCINE | | | |
| | | | | | DEHYDROGENASE.;, mRNA sequence. | | | |
| rxa00476 | 984 | GB_GSS5: AQ770769 | 554 | AQ770769 | HS_5357_B2_H01_T7A RPCI-11 Human Male BAC Library | Homo sapiens | 35,560 | 28-Jul-99 |
| | | | | | Homo sapiens genomic clone Plate = 933 | | | |
| | | | | | Col = 2 Row = P, genomic survey sequence. | | | |
| | | GB_IN1: CEM162 | 39977 | Z82278 | Caenorhabditis elegans cosmid M162, complete sequence. | Caenorhabditis elegans | 34,224 | 19-Nov-99 |
| | | GB_IN1: CEM162 | 39977 | Z82278 | Caenorhabditis elegans cosmid M162, complete sequence. | Caenorhabditis elegans | 33,777 | 19-Nov-99 |
| rxa00481 | 708 | GB_PR4: AC005013 | 195910 | AC005013 | Homo sapiens BAC clone GS165L15 from 7p15, complete sequence. | Homo sapiens | 35,755 | 28-Nov-98 |
| | | GB_HTG1: PFMAL4P4 | 224448 | AL035477 | Plasmodium falciparum chromosome 4 strain 3D7, | Plasmodium falciparum | 37,213 | 11-Aug-99 |
| | | | | | *** SEQUENCING IN PROGRESS ***, in unordered pieces. | | | |
| | | GB_HTG1: PFMAL4P4 | 224448 | AL035477 | Plasmodium falciparum chromosome 4 strain 3D7, | Plasmodium falciparum | 37,213 | 11-Aug-99 |
| | | | | | *** SEQUENCING IN PROGRESS ***, in unordered pieces. | | | |
| rxa00485 | 2418 | GB_EST30: AV017239 | 238 | AV017239 | AV017239 Mus musculus 18-day embryo | Mus musculus | 39,916 | 28-Aug-99 |
| | | | | | C57BL/6J Mus musculus cDNA clone 1110069G23, mRNA sequence. | | | |
| | | GB_EST33: AV093875 | 254 | AV093875 | AV093875 Mus musculus C57BL/6J ES cell | Mus musculus | 38,189 | 22-Nov-99 |
| | | | | | Mus musculus cDNA clone 2400006D21, mRNA sequence. | | | |
| | | GB_EST33: AV084536 | 287 | AV084536 | AV084536 Mus musculus tongue C57BL/6J adult | Mus musculus | 37,282 | 25-Jun-99 |
| | | | | | Mus musculus cDNA clone 2310007K01, mRNA sequence. | | | |
| rxa00486 | 1032 | GB_RO: MUSP3VPR2 | 1089 | AF098867 | Mus sp. 129SV V3/V1b vasopressin receptor gene, exon 2 and complete cds. | Mus musculus | 38,163 | 28-Apr-99 |
| | | GB_GSS9: AQ166448 | 407 | AQ166448 | HS_3137_B2_A06_MR CIT Approved Human | Homo sapiens | 40,250 | 16-OCT-1998 |
| | | | | | Genomic Sperm Library D Homo sapiens genomic | | | |
| | | | | | clone Plate = 3137 Col = 12 Row = B, | | | |
| | | | | | genomic survey sequence. | | | |
| | | GB_GSS15: AQ614261 | 505 | AQ614261 | HS_5123_B1_F11_SP6E RPCI-11 Human Male BAC | Homo sapiens | 37,905 | 15-Jun-99 |
| | | | | | Library Homo sapiens genomic clone | | | |
| | | | | | Plate = 699 Col = 21 Row = L, genomic survey sequence. | | | |
| rxa00490 | 1026 | GB_EST15: AA463205 | 282 | AA463205 | zx71c06.s1 Soares_total_fetus_Nb2HF8_9w Homo sapiens cDNA clone | Homo sapiens | 39,502 | 10-Jun-97 |
| | | | | | IMAGE: 796906 3′, mRNA sequence. | | | |
| | | GB_BA1: SLLINC | 36270 | X79146 | S. lincolnensis (78-11) Lincomycin production genes. | Streptomyces lincolnensis | 37,278 | 15-MAY-1996 |
| | | GB_GSS3: B10984 | 646 | B10984 | F22I8-Sp6 IGF Arabidopsis thaliana genomic clone F22I8, genomic survey sequence. | Arabidopsis thaliana | 39,205 | 14-MAY-1997 |
| rxa00491 | 543 | GB_HTG1: CEY87G2 | 330612 | AL022597 | Caenorhabditis elegans chromosome I clone Y87G2, | Caenorhabditis elegans | 37,405 | 26-OCT-1999 |
| | | | | | *** SEQUENCING IN PROGRESS ***, in | | | |
| | | | | | unordered pieces. | | | |
| | | GB_HTG1: CEY87G2 | 330612 | AL022597 | Caenorhabditis elegans chromosome I clone Y87G2, | Caenorhabditis elegans | 37,405 | 26-OCT-1999 |
| | | | | | *** SEQUENCING IN PROGRESS ***, in | | | |
| | | | | | unordered pieces. | | | |
| | | GB_HTG1: CEY6B3 | 253516 | Z92865 | Caenorhabditis elegans chromosome I clone Y6B3, | Caenorhabditis elegans | 38,213 | 30-Jul-98 |
| | | | | | *** SEQUENCING IN PROGRESS ***, in | | | |
| | | | | | unordered pieces. | | | |
| rxa00493 | 1737 | GB_BA1: SC6G4 | 41055 | AL031317 | Streptomyces coelicolor cosmid 6G4. | Streptomyces coelicolor | 61,649 | 20-Aug-98 |
| | | GB_BA2: U00015 | 42325 | U00015 | Mycobacterium leprae cosmid B1620. | Mycobacterium leprae | 38,567 | 01-MAR-1994 |
| | | GB_BA1: U00020 | 36947 | U00020 | Mycobacterium leprae cosmid B229. | Mycobacterium leprae | 38,567 | 01-MAR-1994 |
| rxa00496 | 1149 | GB_VI: TVRNAP | 6404 | X68414 | Toscana Virus genomic RNA for RNA-dependent RNA polymerase. | Toscana virus | 35,428 | 27-OCT-1992 |
| | | GB_IN2: DMU09808 | 9239 | U09808 | Drosophila melanogaster twisted gastrulation (tsg) and serine protease | Drosophila melanogaster | 36,837 | 25-Jun-98 |
| | | | | | (gd) genes, complete cds. | | | |
| | | GB_IN2: DMU09808 | 9239 | U09808 | Drosophila melanogaster twisted gastrulation (tsg) and serine protease | Drosophila melanogaster | 37,782 | 25-Jun-98 |
| | | | | | (gd) genes, complete cds. | | | |
| rxa00504 | 543 | GB_BA1: MTCY159 | 33818 | Z83863 | Mycobacterium tuberculosis H37Rv complete genome; segment 111/162. | Mycobacterium | 36,961 | 17-Jun-98 |
| | | | | | | tuberculosis | | |
| | | GB_PR1: HUMHM145 | 2214 | D10925 | Human mRNA for HM145. | Homo sapiens | 36,066 | 3-Feb-99 |
| | | GB_EST14: AA415083 | 332 | AA415083 | Mg0017 RCW Lambda Zap Express Library Pyricularia grisea cDNA | Pyricularia grisea | 40,181 | 09-DEC-1999 |
| | | | | | clone RCW17 5′, mRNA sequence. | | | |
| rxa00505 | 618 | GB_PAT: I92047 | 551 | I92047 | Sequence 14 from patent U.S. Pat. No. 5726299. | Unknown. | 46,250 | 01-DEC-1998 |
| | | GB_PAT: I78759 | 549 | I78759 | Sequence 15 from patent U.S. Pat. No. 5693781. | Unknown. | 44,813 | 3-Apr-98 |
| | | GB_PAT: I92048 | 549 | I92048 | Sequence 15 from patent U.S. Pat. No. 5726299. | Unknown. | 44,813 | 01-DEC-1998 |
| rxa00507 | 978 | GB_PR2: HS1063B2 | 114596 | AL035683 | Human DNA sequence from clone 1063B2 on chromosome 20q13.1-13.2. | Homo sapiens | 36,449 | 23-Nov-99 |
| | | | | | Contains the 3′ part of the gene for Beta-1,4-galactosyltransferase, ESTs, | | | |
| | | | | | STSs and GSSs, complete sequence. | | | |
| | | GB_HTG2: AC007225 | 218892 | AC007225 | Homo sapiens chromosome 16 clone 480G7, | Homo sapiens | 36,646 | 6-Apr-99 |
| | | | | | *** SEQUENCING IN PROGRESS ***, 38 unordered pieces. | | | |
| | | GB_HTG2: AC007225 | 218892 | AC007225 | Homo sapiens chromosome 16 clone 480G7, | Homo sapiens | 36,646 | 6-Apr-99 |
| | | | | | *** SEQUENCING IN PROGRESS ***, 38 unordered pieces. | | | |
| rxa00510 | 1632 | GB_GSS4: AQ707590 | 499 | AQ707590 | HS_5560_B1_H02_SP6E RPCI-11 Human Male BAC Library Homo sapiens | Homo sapiens | 37,275 | 7-Jul-99 |
| | | | | | genomic clone Plate = 1136 Col = 3 Row = P, genomic survey sequence. | | | |
| | | GB_GSS4: AQ707590 | 499 | AQ707590 | HS_5560_B1_H02_SP6E RPCI-11 Human Male BAC Library Homo sapiens | Homo sapiens | 37,275 | 7-Jul-99 |
| | | | | | genomic clone Plate = 1136 Col = 3 Row = P, genomic survey sequence. | | | |
| rxa00515 | 825 | GB_BA1: CGICD | 3595 | X71489 | C. glutamicum icd gene for monomeric isocitrate dehydrogenase. | Corynebacterium | 100,000 | 17-Feb-95 |
| | | | | | | glutamicum | | |
| | | GB_BA1: CGICD | 3595 | X71489 | C. glutamicum icd gene for monomeric isocitrate dehydrogenase. | Corynebacterium | 38,150 | 17-Feb-95 |
| | | | | | | glutamicum | | |
| | | GB_GSS13: AQ451896 | 509 | AQ451896 | HS_5184_B1_C03_SP6E RPCI-11 Human Male BAC Library Homo sapiens | Homo sapiens | 36,638 | 21-Apr-99 |
| | | | | | genomic clone Plate = 760 Col = 5 Row = F, genomic survey sequence. | | | |
| rxa00519 | 2337 | GB_BA1: CGICD | 3595 | X71489 | C. glutamicum icd gene for monomeric isocitrate dehydrogenase. | Corynebacterium | 100,000 | 17-Feb-95 |
| | | | | | | glutamicum | | |
| | | GB_BA2: AF127018 | 2560 | AF127018 | Streptomyces coelicolor isocitrate dehydrogenase (idh) gene, idh-B allele, | Streptomyces coelicolor | 66,667 | 1-Jun-99 |
| | | | | | complete cds. | | | |
| | | GB_BA1: AVIICD | 3550 | D73443 | Azotobacter vinelandii icd gene for isocitrate dehydrogenase, complete cds. | Azotobacter vinelandii | 63,652 | 4-Feb-99 |
| rxa00527 | 1887 | GB_PAT: I92049 | 2248 | I92049 | Sequence 16 from patent U.S. Pat. No. 5726299. | Unknown. | 39,250 | 01-DEC-1998 |
| | | GB_PAT: I92053 | 2213 | I92053 | Sequence 20 from patent U.S. Pat. No. 5726299. | Unknown. | 70,635 | 01-DEC-1998 |
| | | GB_BA1: MTCY98 | 31225 | Z83860 | Mycobacterium tuberculosis H37Rv complete genome; segment 103/162. | Mycobacterium | 37,741 | 17-Jun-98 |
| | | | | | | tuberculosis | | |
| rxa00528 | 1212 | GB_BA1: MSGY219 | 38721 | AD000013 | Mycobacterium tuberculosis sequence from clone y219. | Mycobacterium | 68,672 | 10-DEC-1996 |
| | | | | | | tuberculosis | | |
| | | GB_BA1: MTCY21D4 | 20760 | Z80775 | Mycobacterium tuberculosis H37Rv complete genome; segment 3/262. | Mycobacterium | 39,762 | 24-Jun-99 |
| | | | | | | tuberculosis | | |
| | | GB_BA1: SCH24 | 41625 | AL049826 | Streptomyces coelicolor cosmid H24. | Streptomyces coelicolor | 40,411 | 11-MAY-1999 |
| rxa00529 | 666 | GB_PR2: HSAC000109 | 41122 | AC000109 | Human Cosmid g0771a222 from 7q31.3, complete sequence. | Homo sapiens | 37,462 | 11-Sep-97 |
| | | GB_PR2: HSAC000110 | 45508 | AC000110 | Human Cosmid g0771a233, complete sequence. | Homo sapiens | 37,462 | 30-Jan-97 |
| | | GB_PR2: HSAC000109 | 41122 | AC000109 | Human Cosmid g0771a222 from 7q31.3, complete sequence. | Homo sapiens | 39,724 | 11-Sep-97 |
| rxa00530 | 1404 | GB_PR3: HS435C23 | 151798 | Z92844 | Human DNA sequence from PAC 435C23 on chromosome X. Contains ESTs. | Homo sapiens | 36,482 | 23-Nov-99 |
| | | GB_PR3: HS435C23 | 151798 | Z92844 | Human DNA sequence from PAC 435C23 on chromosome X. Contains ESTs. | Homo sapiens | 37,918 | 23-Nov-99 |
| | | GB_PL1: YSCADE3 | 4883 | M12878 | Saccharomyces cerevisiae C-1-tetrahydrofolate synthase (ADE3) gene, complete cds. | Saccharomyces cerevisiae | 37,034 | 11-MAY-1995 |
| rxa00535 | 840 | GB_BA1: CGLEUA | 3492 | X70959 | C. glutamicum gene leuA for isopropylmalate synthase. | Corynebacterium | 100,000 | 10-Feb-99 |
| | | | | | | glutamicum | | |
| | | GB_BA1: CORASKD | 2957 | L16848 | Corynebacterium flavum aspartokinase (ask), and aspartate-semialdehyde | Corynebacterium | 43,750 | 11-Jun-93 |
| | | | | | dehydrogenase (asd) genes, complete cds. | flavescens | | |
| | | GB_GSS10: AQ193141 | 515 | AQ193141 | HS_3060_B1_F11_MF CIT Approved Human Genomic Sperm Library D | Homo sapiens | 44,773 | 4-Nov-98 |
| | | | | | Homo sapiens genomic clone Plate = 3060 Col = 21 Row = L, | | | |
| | | | | | genomic survey sequence. | | | |
| rxa00540 | 366 | GB_PAT: I92052 | 2115 | I92052 | Sequence 19 from patent U.S. Pat. No. 5726299. | Unknown. | 74,795 | 01-DEC-1998 |
| | | GB_HTG2: AC008095 | 126322 | AC008095 | Drosophila melanogaster chromosome 2 clone BACR11H16 (D932) RPCI-98 11.H.16 | Drosophila melanogaster | 41,899 | 2-Aug-99 |
| | | | | | map 52A-52A strain y; cn bw sp, *** SEQUENCING IN PROGRESS ***, | | | |
| | | | | | 95 unordered pieces. | | | |
| | | GB_HTG2: AC008095 | 126322 | AC008095 | Drosophila melanogaster chromosome 2 clone BACR11H16 (D932) RPCI-98 11.H.16 | Drosophila melanogaster | 41,899 | 2-Aug-99 |
| | | | | | map 52A-52A strain y; cn bw sp, *** SEQUENCING IN PROGRESS***, | | | |
| | | | | | 95 unordered pieces. | | | |
| rxa00547 | 1521 | GB_BA1: MSGY219 | 38721 | AD000013 | Mycobacterium tuberculosis sequence from clone y219. | Mycobacterium | 36,910 | 10-DEC-1996 |
| | | | | | | tuberculosis | | |
| | | GB_BA1: MTCY21D4 | 20760 | Z80775 | Mycobacterium tuberculosis H37Rv complete genome; segment 3/262. | Mycobacterium | 51,125 | 24-Jun-99 |
| | | | | | | tuberculosis | | |
| | | GB_EST27: AI415174 | 292 | AI415174 | mc05c02.x1 Soares mouse p3NMF19.5 Mus musculus cDNA clone | Mus musculus | 39,384 | 9-Feb-99 |
| | | | | | IMAGE: 338018 3′, mRNA sequence. | | | |
| rxa00549 | 1797 | GB_PL2: ATAC007135 | 27313 | AC007135 | Arabidopsis thaliana chromosome II BAC F9C22 genomic sequence, | Arabidopsis thaliana | 35,584 | 26-MAY-1999 |
| | | | | | complete sequence. | | | |
| | | GB_PL2: ATAC006921 | 76042 | AC006921 | Arabidopsis thaliana chromosome II BAC F2H17 genomic sequence, | Arabidopsis thaliana | 36,581 | 23-MAR-1999 |
| | | | | | complete sequence. | | | |
| | | GB_PL2: ATAC007135 | 27313 | AC007135 | Arabidopsis thaliana chromosome II BAC F9C22 genomic sequence, | Arabidopsis thaliana | 35,827 | 26-MAY-1999 |
| | | | | | complete sequence. | | | |
| rxa00550 | | | | | | | | |
| rxa00552 | 1059 | GB_BA1: D90742 | 19201 | D90742 | Escherichia coli genomic DNA. (23.8-24.2 min). | Escherichia coli | 46,072 | 7-Feb-99 |
| | | GB_BA1: ECHTRB | 3129 | X61000 | E. coli K12 HtrB gene. | Escherichia coli | 39,164 | 30-Jun-93 |
| | | GB_BA2: AE000207 | 11148 | AE000207 | Escherichia coli K-12 MG1655 section 97 of 400 of the complete genome. | Escherichia coli | 46,072 | 12-Nov-98 |
| rxa00553 | 444 | GB_EST18: AB009093 | 479 | AB009093 | AB009093 Chlamydomonas W80 lambda ZAP II Chlamydomonas sp. cDNA similar | Chlamydomonas sp. | 41,808 | 05-DEC-1997 |
| | | | | | to photosystem II 10 kDa protein, mRNA sequence. | | | |
| | | GB_EST30: AI640954 | 641 | AI640954 | AEMTAP02 Aedes aegypti MT pSPORT Library Aedes aegypti cDNA clone | Aedes aegypti | 38,991 | 28-Apr-99 |
| | | | | | AP02 5′, mRNA sequence. | | | |
| | | GB_GSS13: AQ467517 | 206 | AQ467517 | HS_5219_A2_F02_SP6E RPCI-11 Human Male BAC Library Homo sapiens | Homo sapiens | 45,255 | 23-Apr-99 |
| | | | | | genomic clone Plate = 795 Col = 4 Row = K, genomic survey sequence. | | | |
| rxa00554 | 594 | GB_EST6: W04418 | 364 | W04418 | za43c06.r1 Soares fetal liver spleen 1NFLS Homo sapiens cDNA clone | Homo sapiens | 39,688 | 22-Apr-96 |
| | | | | | IMAGE: 295306 5′, mRNA sequence. | | | |
| | | GB_EST35: AL041829 | 564 | AL041829 | DKFZp434C0318_s1 434 (synonym: htes3) Homo sapiens cDNA clone | Homo sapiens | 40,433 | 29-Sep-99 |
| | | | | | DKFZp434C0318 3′, mRNA sequence. | | | |
| | | GB_EST35: AL041828 | 386 | AL041828 | DKFZp434C0318_r1 434 (synonym: htes3) Homo sapiens cDNA clone | Homo sapiens | 39,688 | 29-Sep-99 |
| | | | | | DKFZp434C0318 5′, mRNA sequence. | | | |
| rxa00555 | | | | | | | | |
| rxa00560 | 498 | GB_BA1: MTCY7H7A | 10451 | Z95618 | Mycobacterium tuberculosis H37Rv complete genome; segment 39/162. | Mycobacterium | 52,727 | 17-Jun-98 |
| | | | | | | tuberculosis | | |
| | | GB_BA1: BAPURF | 1885 | X91252 | B. ammoniagenes purF gene. | Corynebacterium | 61,092 | 5-Jun-97 |
| | | | | | | ammoniagenes | | |
| | | GB_PL1: YSCMET10A | 3650 | L26504 | Saccharomyces carlsbergensis assimilatory sulfite reductase (MET10) gene, | Saccharomyces | 41,273 | 7-Feb-95 |
| | | | | | complete cds. | pastorianus | | |
| rxa00563 | 2762 | GB_BA1: BAFASAA | 10549 | X64795 | B. ammoniagenes FAS gene. | Corynebacterium | 66,910 | 14-OCT-1997 |
| | | | | | | ammoniagenes | | |
| | | GB_BA1: MTCY159 | 33818 | Z83863 | Mycobacterium tuberculosis H37Rv complete genome; segment 111/162. | Mycobacterium | 40,066 | 17-Jun-98 |
| | | | | | | tuberculosis | | |
| | | GB_BA1: MBU36763 | 8391 | U36763 | Mycobacterium bovis fatty acid synthase gene, complete cds. | Mycobacterium bovis | 61,178 | 15-Jul-96 |
| rxa00564 | 528 | GB_PR3: HS833B7 | 86574 | AL008637 | Human DNA sequence from clone 833B7 on chromosome 22q12.3-13.2 | Homo sapiens | 39,015 | 23-Nov-99 |
| | | | | | Contains genes for NCF4 (P40PHOX) protein, cytokine receptor common beta chain | | | |
| | | | | | precursor CSF2RB (partial), ESTs, CA repeat, STS, GSS, complete sequence. | | | |
| | | GB_HTG3: AC008543 | 278334 | AC008543 | Homo sapiens chromosome 19 clone CIT-HSPC_499B15, | Homo sapiens | 36,328 | 2-Sep-99 |
| | | | | | *** SEQUENCING IN PROGRESS ***, 134 unordered pieces. | | | |
| | | GB_HTG3: AC008543 | 278334 | AC008543 | Homo sapiens chromosome 19 clone CIT-HSPC_499B15, | Homo sapiens | 36,328 | 2-Sep-99 |
| | | | | | *** SEQUENCING IN PROGRESS ***, 134 unordered pieces. | | | |
| rxa00573 | | | | | | | | |
| rxa00574 | 1002 | GB_GSS11: AQ301816 | 481 | AQ301816 | HS_3174_A1_B04_T7 CIT Approved Human Genomic Sperm Library | Homo sapiens | 43,137 | 16-DEC-1998 |
| | | | | | D Homo sapiens genomic clone Plate = 3174 Col = 7 Row = C, | | | |
| | | | | | genomic survey sequence. | | | |
| | | GB_PR3: AC004537 | 88872 | AC004537 | Homo sapiens PAC clone DJ0872F07 from 7q31, complete sequence. | Homo sapiens | 34,712 | 9-Apr-98 |
| | | GB_EST29: AI563059 | 339 | AI563059 | EST00183 watermelon lambda zap library Citrullus lanatus cDNA clone WMLS355 | Citrullus lanatus | 37,758 | 26-MAR-1999 |
| | | | | | 5′ similar to unknown protein, mRNA sequence. | | | |
| rxa00576 | 795 | GB_EST37: AI947508 | 533 | AI947508 | 603022E09.x1 603 - stressed root cDNA library from Wang/Bohnert lab Zea mays | Zea mays | 38,728 | 19-Aug-99 |
| | | | | | cDNA, mRNA sequence. | | | |
| | | GB_GSS11: AQ296770 | 347 | AQ296770 | HS_3087_A2_B12_MF CIT Approved Human Genomic Sperm Library D Homo | Homo sapiens | 40,058 | 15-DEC-1998 |
| | | | | | sapiens genomic clone Plate = 3087 Col = 24 Row = C, genomic survey sequence. | | | |
| | | GB_GSS13: AQ503769 | 589 | AQ503769 | RPCI-11-282O13.TV RPCI-11 Homo sapiens genomic clone RPCI-11-282O13, | Homo sapiens | 37,993 | 29-Apr-99 |
| | | | | | genomic survey sequence. | | | |
| rxa00577 | 471 | GB_GSS14: AQ533027 | 638 | AQ533027 | RPCI-11-351M24.TJ RPCI-11 Homo sapiens genomic clone RPCI-11-351M24, | Homo sapiens | 34,944 | 18-MAY-1999 |
| | | | | | genomic survey sequence. | | | |
| | | GB_PR3: HS440B3 | 28047 | AL022331 | Homo sapiens DNA sequence from clone 440B3 on chromosome 22q12.1-3 | Homo sapiens | 33,626 | 23-Nov-99 |
| | | | | | Contains a pseudogene similar to 60S Ribosomal protein L17. | | | |
| | | | | | Contains ESTs and an STS (genomic marker D22S1176), complete sequence. | | | |
| | | GB_PL2: ZEU19267 | 1230 | U19267 | Zinnia elegans cysteine proteinase mRNA, complete cds. | Zinnia elegans | 35,456 | 26-Aug-96 |
| rxa00578 | | | | | | | | |
| rxa00582 | 642 | GB_BA1: CORAHPS | 2570 | L07603 | Corynebacterium glutamicum 3-deoxy-D-arabinoheptulosonate-7-phosphate | Corynebacterium | 98,901 | 26-Apr-93 |
| | | | | | synthase gene, complete cds. | glutamicum | | |
| | | GB_PR3: AC005389 | 120359 | AC005389 | Homo sapiens chromosome 17, clone hRPK.601_N_13, complete sequence. | Homo sapiens | 38,315 | 14-Aug-98 |
| | | GB_HTG6: AC008002 | 126629 | AC008002 | Drosophila melanogaster chromosome 2 clone BACR48E08 (D843) RPCI-98 48.E.8 | Drosophila melanogaster | 32,437 | 07-DEC-1999 |
| | | | | | map 21D-21E strain y; cn bw sp, *** SEQUENCING IN PROGRESS ***, | | | |
| | | | | | 85 unordered pieces. | | | |
| rxa00585 | 441 | GB_BA1: CORAHPS | 2570 | L07603 | Corynebacterium glutamicum 3-deoxy-D-arabinoheptulosonate-7-phosphate | Corynebacterium | 98,039 | 26-Apr-93 |
| | | | | | synthase gene, complete cds. | glutamicum | | |
| | | GB_PR4: AC004970 | 149951 | AC004970 | Homo sapiens BAC clone DJ1122F04 from 7q11.23-q21.2, complete sequence. | Homo sapiens | 39,900 | 27-Aug-99 |
| | | GB_PR2: HS102G20 | 99207 | Z99127 | Human DNA sequence from PAC 102G20 on chromosome 1q24-q25. Contains ESTS, | Homo sapiens | 41,509 | 23-Nov-99 |
| | | | | | STSs and a predicted CpG island. | | | |
| rxa00586 | 1005 | GB_BA1: MTV017 | 67200 | AL021897 | Mycobacterium tuberculosis H37Rv complete genome; segment 48/162. | Mycobacterium | 56,219 | 24-Jun-99 |
| | | | | | | tuberculosis | | |
| | | GB_BA1: MLU15183 | 36800 | U15183 | Mycobacterium leprae cosmid B1740. | Mycobacterium leprae | 55,622 | 09-MAR-1995 |
| | | GB_BA1: MTV017 | 67200 | AL021897 | Mycobacterium tuberculosis H37Rv complete genome; segment 48/162. | Mycobacterium | 37,838 | 24-Jun-99 |
| | | | | | | tuberculosis | | |
| rxa00587 | 459 | GB_EST37: AI993539 | 514 | AI993539 | 701496589 A. thaliana, Ohio State clone set Arabidopsis thaliana cDNA | Arabidopsis thaliana | 40,153 | 8-Sep-99 |
| | | | | | clone 701496589, mRNA sequence. | | | |
| | | GB_GSS10: AQ224941 | 511 | AQ224941 | HS_2009_B1_B06_T7 CIT Approved Human Genomic Sperm Library D | Homo sapiens | 43,750 | 20-Sep-98 |
| | | | | | Homo sapiens genomic clone Plate = 2009 Col = 11 Row = D, | | | |
| | | | | | genomic survey sequence. | | | |
| | | GB_EST23: AI099719 | 475 | AI099719 | 33872 Lambda-PRL2 Arabidopsis thaliana cDNA clone 120M10XP 3′, | Arabidopsis thaliana | 36,752 | 21-Aug-98 |
| | | | | | mRNA sequence. | | | |
| rxa00589 | 573 | GB_PL2: ATAC003673 | 70575 | AC003673 | Arabidopsis thaliana chromosome II BAC F19F24 genomic sequence, | Arabidopsis thaliana | 39,785 | 1-Apr-98 |
| | | | | | complete sequence. | | | |
| | | GB_PR3: HS427A4 | 149466 | Z98049 | Human DNA sequence from PAC 427A4 on chromosome 6q26-q27. Contains | Homo sapiens | 35,145 | 23-Nov-99 |
| | | | | | ribosomal protein S6 kinase, RSK3, ESTs, CpG island. | | | |
| | | GB_PL2: ATAC005724 | 86671 | AC005724 | Arabidopsis thaliana chromosome II P1 MSF3 genomic sequence, complete sequence. | Arabidopsis thaliana | 39,785 | 24-Jan-99 |
| rxa00595 | | | | | | | | |
| rxa00597 | 393 | GB_PR3: AC004659 | 129577 | AC004659 | Homo sapiens chromosome 19, CIT-HSP-87m17 BAC clone, complete sequence. | Homo sapiens | 39,459 | 02-MAY-1998 |
| | | GB_GSS14: AQ575039 | 927 | AQ575039 | nbxb0086L01r CUGI Rice BAC Library Oryza sativa genomic clone | Oryza sativa | 37,786 | 2-Jun-99 |
| | | | | | nbxb0086L01r, genomic survey sequence. | | | |
| | | GB_BA1: NMRRNA | 5209 | X72495 | N. magadii rRNA operon. | Natrialba magadii | 39,788 | 10-Feb-95 |
| rxa00598 | | | | | | | | |
| rxa00601 | 414 | GB_BA2: AF175719 | 1368 | AF175719 | Porphyromonas gingivalis strain W50 immunoreactive 51 kD antigen | Porphyromonas gingivalis | 35,331 | 23-Aug-99 |
| | | | | | PG52 gene, complete cds. | | | |
| | | GB_GSS9: AQ140775 | 464 | AQ140775 | HS_3128_A1_B11_MR CIT Approved Human Genomic Sperm Library D | Homo sapiens | 40,431 | 24-Sep-98 |
| | | | | | Homo sapiens genomic clone Plate = 3128 Col = 21 Row = C, | | | |
| | | | | | genomic survey sequence. | | | |
| | | GB_EST8: AA018824 | 542 | AA018824 | ze57e09.s1 Soares retina N2b4HR Homo sapiens cDNA clone IMAGE: 363112 3′, | Homo sapiens | 40,590 | 30-Jan-97 |
| | | | | | mRNA sequence. | | | |
| rxa00602 | 876 | GB_EST30: AI642687 | 479 | AI642687 | vw02h03.x1 Soares mouse mammary gland NbMMG Mus musculus cDNA clone | Mus musculus | 40,042 | 29-Apr-99 |
| | | | | | IMAGE: 1230773 3′, mRNA sequence. | | | |
| | | GB_EST20: AA879989 | 412 | AA879989 | vw03a05.r1 Soares mouse mammary gland NbMMG Mus musculus cDNA clone | Mus musculus | 39,948 | 26-MAR-1998 |
| | | | | | IMAGE: 1230800 5′, mRNA sequence. | | | |
| | | GB_EST28: AI481047 | 438 | AI481047 | vf91a05.x1 Soares mouse mammary gland NbMMG Mus musculus cDNA clone | Mus musculus | 38,128 | 09-MAR-1999 |
| | | | | | IMAGE: 851120 3′, mRNA sequence. | | | |
| rxa00604 | 414 | GB_HTG2: AC008205 | 131658 | AC008205 | Drosophila melanogaster chromosome 3 clone BACR33F18 (D764) RPCI-98 | Drosophila melanogaster | 33,907 | 2-Aug-99 |
| | | | | | 33.F.18 map 96A-96B strain y; cn bw sp, *** SEQUENCING IN PROGRESS ***, | | | |
| | | | | | 118 unordered pieces. | | | |
| | | GB_HTG2: AC008205 | 131658 | AC008205 | Drosophila melanogaster chromosome 3 clone BACR33F18 (D764) RPCI-98 33.F.18 | Drosophila melanogaster | 33,907 | 2-Aug-99 |
| | | | | | map 96A-96B strain y; cn bw sp, *** SEQUENCING IN PROGRESS***, | | | |
| | | | | | 118 unordered pieces. | | | |
| | | GB_IN1: DMBR7C10 | 56820 | AL121804 | Drosophila melanogaster clone BACR7C10. | Drosophila melanogaster | 44,267 | 10-OCT-1999 |
| rxa00610 | 987 | GB_BA1: SME242575 | 1403 | AJ242575 | Sinorhizobium meliloti partial oxi1 and dehydrogenase genes, isolate lpu119. | Sinorhizobium meliloti | 41,760 | 26-MAY-1999 |
| | | GB_PR3: AC004655 | 134929 | AC004655 | Homo sapiens Xp22-140-141 BAC GSHB-128G5 (Genome Systems Human | Homo sapiens | 38,422 | 17-Sep-98 |
| | | | | | BAC library) complete sequence. | | | |
| | | GB_PR3: HS598F2 | 99886 | AL021579 | Human DNA sequence from clone 598F2 on chromosome 1q23.1-24.3 Contains | Homo sapiens | 38,351 | 23-Nov-99 |
| | | | | | ESTs, STS and GSS, complete sequence. | | | |
| rxa00611 | 1599 | GB_HTG2: AC007108 | 190000 | AC007108 | Homo sapiens chromosome 4, *** SEQUENCING IN PROGRESS ***, | Homo sapiens | 17,451 | 17-MAR-1999 |
| | | | | | 24 unordered pieces. | | | |
| | | GB_HTG2: AC007108 | 190000 | AC007108 | Homo sapiens chromosome 4, *** SEQUENCING IN PROGRESS ***, | Homo sapiens | 17,451 | 17-MAR-1999 |
| | | | | | 24 unordered pieces. | | | |
| | | GB_HTG4: AC010893 | 176178 | AC010893 | Homo sapiens chromosome unknown clone NH0480A20, | Homo sapiens | 35,819 | 29-OCT-1999 |
| | | | | | WORKING DRAFT SEQUENCE, in unordered pieces. | | | |
| rxa00613 | 576 | GB_IN2: AC004361 | 87747 | AC004361 | Drosophila melanogaster DNA sequence (P1 DS07851 (D49)), complete sequence. | Drosophila melanogaster | 35,081 | 29-MAY-1998 |
| | | GB_PL2: AC006268 | 105420 | AC006268 | Arabidopsis thaliana BAC T24G23 from chromosome IV near 21 cM, | Arabidopsis thaliana | 43,682 | 1-Jan-99 |
| | | | | | complete sequence. | | | |
| | | GB_BA1: MLCB596 | 38426 | AL035472 | Mycobacterium leprae cosmid B596. | Mycobacterium leprae | 35,026 | 27-Aug-99 |
| rxa00614 | 1038 | GB_BA1: MTV025 | 121125 | AL022121 | Mycobacterium tuberculosis H37Rv complete genome; segment 155/162. | Mycobacterium | 53,061 | 24-Jun-99 |
| | | | | | | tuberculosis | | |
| | | GB_BA1: SCH66 | 9153 | AL049731 | Streptomyces coelicolor cosmid H66. | Streptomyces coelicolor | 52,817 | 29-Apr-99 |
| | | GB_EST14: AA446728 | 411 | AA446728 | zw84f03.r1 Soares_total_fetus_Nb2HF8_9w Homo sapiens cDNA clone | Homo sapiens | 36,548 | 3-Jun-97 |
| | | | | | IMAGE: 783677 5′, mRNA sequence. | | | |
| rxa00616 | | | | | | | | |
| rxa00617 | 351 | GB_PL1: AB009030 | 2589 | AB009030 | Panax ginseng OSCPNY1 mRNA for beta-Amyrin Synthase, complete cds. | Panax ginseng | 39,048 | 03-OCT-1998 |
| | | GB_PR3: HS905G11 | 122469 | AL035045 | Human DNA sequence from clone 905G11 on chromosome 20p11.2-12.1. | Homo sapiens | 39,255 | 23-Nov-99 |
| | | | | | Contains STSs, GSSs and genomic marker D20S182, complete sequence. | | | |
| | | GB_RO: MMT1CPS | 8147 | X15147 | Mouse Tla region T1c pseudogene for class I antigen major | Mus musculus | 36,311 | 19-Feb-90 |
| | | | | | histocompatibility complex. | | | |
| rxa00628 | 531 | GB_HTG5: AC010674 | 220575 | AC010674 | Homo sapiens chromosome 15 clone RP11-430B1 map 15q21, | Homo sapiens | 37,714 | 5-Nov-99 |
| | | | | | *** SEQUENCING IN PROGRESS ***, 46 ordered pieces. | | | |
| | | GB_HTG5: AC010674 | 220575 | AC010674 | Homo sapiens chromosome 15 clone RP11-430B1 map 15q21, | Homo sapiens | 39,293 | 5-Nov-99 |
| | | | | | *** SEQUENCING IN PROGRESS ***, 46 ordered pieces. | | | |
| rxa00631 | 1578 | GB_BA1: BRLBIOAD | 2272 | D14083 | Brevibacterium flavum genes for 7,8-diaminopelargonic acid aminotransferase | Corynebacterium | 47,368 | 3-Feb-99 |
| | | | | | and dethiobiotin synthetase, complete cds. | glutamicum | | |
| | | GB_PAT: E04041 | 675 | E04041 | DNA sequence coding for desthiobiotinsynthetase. | Corynebacterium | 46,552 | 29-Sep-97 |
| | | | | | | glutamicum | | |
| | | GB_EST20: AA820386 | 453 | AA820386 | LD23968.5prime LD Drosophila melanogaster embryo pOT2 | Drosophila melanogaster | 45,679 | 25-Feb-99 |
| | | | | | Drosophila melanogaster cDNA clone LD23968 5prime, mRNA sequence. | | | |
| rxa00637 | 876 | GB_HTG2: AC007589 | 134659 | AC007589 | Drosophila melanogaster chromosome 3 clone BACR20D10 (D667) RPCI-98 | Drosophila melanogaster | 32,102 | 2-Aug-99 |
| | | | | | 20.D.10 map 82D-82E strain y; cn bw sp, *** SEQUENCING IN PROGRESS ***, | | | |
| | | | | | 73 unordered pieces. | | | |
| | | GB_HTG2: AC007589 | 134659 | AC007589 | Drosophila melanogaster chromosome 3 clone BACR20D10 (D667) RPCI-98 20.D.10 | Drosophila melanogaster | 32,102 | 2-Aug-99 |
| | | | | | map 82D-82E strain y; cn bw sp, *** SEQUENCING IN PROGRESS ***, | | | |
| | | | | | 73 unordered pieces. | | | |
| | | GB_HTG3: AC009212 | 125452 | AC009212 | Drosophila melanogaster chromosome 3 clone BACR01A18 (D669) RPCI-98 01.A.18 | Drosophila melanogaster | 37,126 | 23-Aug-99 |
| | | | | | map 82E-82F strain y; cn bw sp, *** SEQUENCING IN PROGRESS***, | | | |
| | | | | | 119 unordered pieces. | | | |
| rxa00646 | 541 | GB_HTG1: AP000488 | 123363 | AP000488 | Homo sapiens chromosome 11 clone B759H8 map 11q23, | Homo sapiens | 38,264 | 13-Sep-99 |
| | | | | | *** SEQUENCING IN PROGRESS ***, in unordered pieces. | | | |
| | | GB_HTG1: AP000488 | 123363 | AP000488 | Homo sapiens chromosome 11 clone B759H8 map 11q23, | Homo sapiens | 38,264 | 13-Sep-99 |
| | | | | | *** SEQUENCING IN PROGRESS***, in unordered pieces. | | | |
| | | GB_HTG1: AP000488 | 123363 | AP000488 | Homo sapiens chromosome 11 clone B759H8 map 11q23, | Homo sapiens | 36,484 | 13-Sep-99 |
| | | | | | *** SEQUENCING IN PROGRESS ***, in unordered pieces. | | | |
| rxa00647 | 756 | GB_GSS13: AQ431426 | 536 | AQ431426 | HS_5140_A2_E01_T7A RPCI-11 Human Male BAC Library Homo sapiens | Homo sapiens | 35,635 | 31-MAR-1999 |
| | | | | | genomic clone Plate = 716 Col = 2 Row = I, genomic survey sequence. | | | |
| | | GB_OV: CHKP4HA | 3149 | M26217 | Chicken prolyl 4-hydroxylase alpha subunit gene, 3′ end. | Gallus gallus | 40,655 | 28-Apr-93 |
| | | GB_HTG2: AC008271 | 168302 | AC008271 | Homo sapiens clone NH0123E16, *** SEQUENCING IN PROGRESS ***, | Homo sapiens | 37,417 | 31-Jul-99 |
| | | | | | 2 unordered pieces. | | | |
| rxa00649 | 579 | GB_PR2: AC002563 | 136436 | AC002563 | Human PAC clone 127H14 from 12q, complete sequence. | Homo sapiens | 37,937 | 26-Sep-97 |
| | | GB_HTG3: AC011466 | 165953 | AC011466 | Homo sapiens chromosome 19 clone CIT-HSPC_453G23, | Homo sapiens | 38,179 | 07-OCT-1999 |
| | | | | | *** SEQUENCING IN PROGRESS ***, 74 unordered pieces. | | | |
| | | GB_HTG3: AC011466 | 165953 | AC011466 | Homo sapiens chromosome 19 clone CIT-HSPC_453G23, | Homo sapiens | 38,179 | 07-OCT-1999 |
| | | | | | *** SEQUENCING IN PROGRESS ***, 74 unordered pieces. | | | |
| rxa00652 | | | | | | | | |
| rxa00653 | | | | | | | | |
| rxa00654 | 1389 | GB_EST1: Z34080 | 271 | Z34080 | ATTS3128 Grenoble-B Arabidopsis thaliana cDNA clone GBGe328 5′, | Arabidopsis thaliana | 40,370 | 6-Jun-94 |
| | | | | | mRNA sequence. | | | |
| | | GB_PR3: AC004460 | 113803 | AC004460 | Homo sapiens PAC clone DJ1086D14, complete sequence. | Homo sapiens | 36,150 | 24-MAR-1998 |
| | | GB_GSS6: AQ835185 | 571 | AQ835185 | HS_4832_A1_E02_T7A CIT Approved Human Genomic Sperm Library D Homo | Homo sapiens | 39,429 | 27-Aug-99 |
| | | | | | sapiens genomic clone Plate = 4832 Col = 3 Row = I, genomic survey sequence. | | | |
| rxa00656 | 384 | GB_HTG3: AC009948 | 172463 | AC009948 | Homo sapiens clone NH0065L03, *** SEQUENCING IN PROGRESS ***, | Homo sapiens | 43,164 | 25-Sep-99 |
| | | | | | 2 unordered pieces. | | | |
| | | GB_HTG3: AC009948 | 172463 | AC009948 | Homo sapiens clone NH0065L03, *** SEQUENCING IN PROGRESS ***, | Homo sapiens | 43,164 | 25-Sep-99 |
| | | | | | 2 unordered pieces. | | | |
| | | GB_GSS13: AQ462899 | 522 | AQ462899 | HS_5212_A1_C09_T7A RPCI-11 Human Male BAC Library Homo sapiens | Homo sapiens | 42,529 | 23-Apr-99 |
| | | | | | genomic clone Plate = 788 Col = 17 Row = E, genomic survey sequence. | | | |
| rxa00657 | 1026 | GB_BA2: AF064700 | 3481 | AF064700 | Rhodococcus sp. NO1-1 CprS and CprR genes, complete cds. | Rhodococcus sp. NO1-1 | 40,558 | 15-Jul-98 |
| | | GB_PR3: AC005346 | 38849 | AC005346 | Homo sapiens chromosome 16, cosmid clone 2H2 (LANL), complete sequence. | Homo sapiens | 35,553 | 31-Jul-98 |
| | | GB_HTG3: AC008905 | 129915 | AC008905 | Homo sapiens chromosome 5 clone CITB-H1_2259I14, *** SEQUENCING IN | Homo sapiens | 37,179 | 3-Aug-99 |
| | | | | | PROGRESS ***, 40 unordered pieces. | | | |
| rxa00661 | 813 | GB_PL2: AC006193 | 118335 | AC006193 | Arabidopsis thaliana chromosome 1 BAC F13O11 genomic sequence, | Arabidopsis thaliana | 35,513 | 11-Jun-99 |
| | | | | | complete sequence. | | | |
| | | GB_RO: MMFABPE | 6593 | AJ223066 | Mus musculus Fabpe gene. | Mus musculus | 37,500 | 27-Jul-98 |
| | | GB_PL2: AC006193 | 118335 | AC006193 | Arabidopsis thaliana chromosome 1 BAC F13O11 genomic sequence, | Arabidopsis thaliana | 33,552 | 11-Jun-99 |
| | | | | | complete sequence. | | | |
| rxa00662 | 1392 | GB_EST29: AI551960 | 718 | AI551960 | vi48d09.y1 Beddington mouse embryonic region Mus musculus cDNA clone | Mus musculus | 39,972 | 23-MAR-1999 |
| | | | | | IMAGE: 907025 5′ similar to gb: D10576 Mouse mRNA for ubiquitin activating | | | |
| | | | | | enzyme E1 (MOUSE);, mRNA sequence. | | | |
| | | GB_BA2: AE000633 | 19734 | AE000633 | Helicobacter pylori 26695 section 111 of 134 of the complete genome. | Helicobacter pylori 26695 | 36,606 | 6-Apr-99 |
| | | GB_GSS10: AQ216730 | 529 | AQ216730 | HS_2262_A1_G06_MR CIT Approved Human Genomic Sperm Library D Homo | Homo sapiens | 32,703 | 19-Sep-98 |
| | | | | | sapiens genomic clone Plate = 2262 Col = 11 Row = M, | | | |
| | | | | | genomic survey sequence. | | | |
| rxa00666 | 1038 | GB_HTG3: AC009205 | 113482 | AC009205 | Drosophila melanogaster chromosome 2 clone BACR04C20 (D1035) | Drosophila melanogaster | 36,713 | 17-Sep-99 |
| | | | | | RPCI-98 04.C.20 map 36E-37C strain y; cn bw sp, *** SEQUENCING | | | |
| | | | | | IN PROGRESS ***, 101 unordered pieces. | | | |
| | | GB_EST25: AI259480 | 626 | AI259480 | LP02903.5prime LP Drosophila melanogaster larval-early pupal pOT2 | Drosophila melanogaster | 37,173 | 17-Nov-98 |
| | | | | | Drosophila melanogaster cDNA clone LP02903 5prime, mRNA sequence. | | | |
| | | GB_HTG3: AC009205 | 113482 | AC009205 | Drosophila melanogaster chromosome 2 clone BACR04C20 (D1035) | Drosophila melanogaster | 36,713 | 17-Sep-99 |
| | | | | | RPCI-98 04.C.20 map 36E-37C strain y; cn bw sp, | | | |
| | | | | | *** SEQUENCING IN PROGRESS ***, 101 unordered pieces. | | | |
| rxa00667 | 1137 | GB_PAT: AR048317 | 2627 | AR048317 | Sequence 3 from patent U.S. Pat. No. 5821090. | Unknown. | 39,805 | 29-Sep-99 |
| | | GB_PAT: A46560 | 2627 | A46560 | Sequence 3 from Patent WO9526406. | Eremothecium gossypii | 39,805 | 07-MAR-1997 |
| | | GB_VI: HEHCMVCG | 229354 | X17403 | Human cytomegalovirus strain AD169 complete genome. | human herpesvirus 5 | 39,854 | 10-Feb-99 |
| rxa00676 | 870 | GB_HTG1: CEY38F1 | 178443 | Z98861 | Caenorhabditis elegans chromosome II clone Y38F1, *** SEQUENCING | Caenorhabditis elegans | 35,880 | 03-DEC-1998 |
| | | | | | IN PROGRESS ***, in unordered pieces. | | | |
| | | GB_HTG1: CEY38F1 | 178443 | Z98861 | Caenorhabditis elegans chromosome II clone Y38F1, *** SEQUENCING IN | Caenorhabditis elegans | 35,880 | 03-DEC-1998 |
| | | | | | PROGRESS ***, in unordered pieces. | | | |
| | | GB_PR3: HS934G17 | 107603 | AL021155 | Homo sapiens DNA sequence from PAC 934G17 on chromosome 1p36.21. | Homo sapiens | 38,489 | 23-Nov-99 |
| | | | | | Contains the alternatively spliced CLCN6 gene for chloride chanel proteins CLC-6A | | | |
| | | | | | (KIAA0046) -B, -C and -D, the alternatively spliced NPPA gene coding for Atrial | | | |
| | | | | | Natriuretic Factor ANF precursor (Atrial Natriuretic peptide ANP, Prepronatriodilatin), | | | |
| | | | | | the NPPB gene for Brain Natriuretic Protein BNP, and a | | | |
| | | | | | pseudogene similar to SBF1 (and other Myotubularin-related protein | | | |
| | | | | | genes). Contains ESTs, STSs and the genomic marker D1S2740, complete sequence. | | | |
| rxa00678 | 858 | GB_PR2: CNS00004 | 205573 | AL049778 | Human chromosome 14 DNA sequence *** IN PROGRESS *** BAC R-643C12 of | Homo sapiens | 33,138 | 17-Jun-99 |
| | | | | | RPCI-11 library from chromosome 14 of Homo sapiens (Human), complete sequence. | | | |
| | | GB_GSS1: AG000894 | 723 | AG000894 | Homo sapiens genomic DNA, 21q region, clone: 64E11X19, | Homo sapiens | 37,391 | 6-Feb-99 |
| | | | | | genomic survey sequence. | | | |
| | | GB_IN1: TSMIEXRNA | 481 | X90847 | Trypanosoma simiae mini-exon DNA. | Trypanosoma simiae | 35,135 | 15-Feb-99 |
| rxa00691 | 1053 | GB_EST26: AA899042 | 505 | AA899042 | UI-R-E0-bz-a-06-0-UI.s2 UI-R-E0 Rattus norvegicus cDNA clone | Rattus norvegicus | 41,400 | 4-Jul-99 |
| | | | | | UI-R-E0-bz-a-06-0-UI 3′ similar to gi\|485266\|gb\|U09256\|RNU09256 | | | |
| | | | | | Rattus norvegicus Sprague-Dawley transketolase mRNA, complete cds, | | | |
| | | | | | mRNA sequence. | | | |
| | | GB_RO: RNU09256 | 2098 | U09256 | Rattus norvegicus Sprague-Dawley transketolase mRNA, complete cds. | Rattus norvegicus | 39,652 | 11-MAY-1994 |
| | | GB_EST29: AI599628 | 510 | AI599628 | EST251331 Normalized rat embryo, Bento Soares Rattus sp, cDNA clone REMEH65 | Rattus sp. | 39,096 | 21-Apr-99 |
| | | | | | 3′ end, mRNA sequence. | | | |
| rxa00692 | 1257 | GB_PL2: SPU66305 | 8226 | U66305 | Schizosaccharomyces pombe ABC transporter (mam1) gene, complete cds. | Schizosaccharomyces | 36,842 | 30-Jul-97 |
| | | | | | | pombe | | |
| | | GB_PL1: SPBC25B2 | 26016 | AL031853 | S. pombe chromosome II cosmid c25B2. | Schizosaccharomyces | 36,803 | 09-OCT-1998 |
| | | | | | | pombe | | |
| | | GB_PL1: SPBC2G5 | 23645 | AL033385 | S. pombe chromosome II cosmid c2G5. | Schizosaccharomyces | 36,803 | 04-DEC-1998 |
| | | | | | | pombe | | |
| rxa00693 | 606 | GB_BA2: RRU65510 | 16259 | U65510 | Rhodospirillum rubrum CO-induced hydrogenase operon (cooM, cooK, cooL, | Rhodospirillum rubrum | 41,970 | 9-Apr-97 |
| | | | | | cooX, cooU, cooH) genes, iron sulfur protein (cooF) gene, carbon monoxide | | | |
| | | | | | dehydrogenase (cooS) gene, carbon monoxide dehydrogenase accessory proteins | | | |
| | | | | | (cooC, cooT, cooJ) genes, putative transcriptional activator (cooA) gene, | | | |
| | | | | | nicotinate-nucleotide pyrophosphorylase (nadC) gene, complete cds, | | | |
| | | | | | L-aspartate oxidase (nadB) gene, and alkyl hydroperoxide reductase (ahpC) | | | |
| | | | | | gene, partial cds. | | | |
| | | GB_PL1: LETHM27 | 1152 | X95296 | L. esculentum mRNA for THM27 protein. | Lycopersicon esculentum | 38,919 | 10-Jun-96 |
| | | GB_EST38: AW033855 | 646 | AW033855 | EST277426 tomato callus, TAMU Lycopersicon esculentum cDNA clone cLEC29F6 | Lycopersicon esculentum | 35,945 | 15-Sep-99 |
| | | | | | similar to transcription factor, myb-related, mRNA sequence. | | | |
| rxa00701 | 498 | GB_EST34: AI785570 | 454 | AI785570 | uj44d03.x1 Sugano mouse liver mlia Mus musculus cDNA clone IMAGE: 1922789 3′ | Mus musculus | 37,565 | 2-Jul-99 |
| | | | | | similar to gb: Z28407 60S RIBOSOMAL PROTEIN L8 (HUMAN);, mRNA sequence. | | | |
| | | GB_EST25: AI256147 | 684 | AI256147 | ui95e12.x1 Sugano mouse liver mlia Mus musculus cDNA clone IMAGE: 1890190 | Mus musculus | 41,232 | 12-Nov-98 |
| | | | | | 3′ similar to gb: Z28407 60S RIBOSOMAL PROTEIN L8 (HUMAN);, | | | |
| | | | | | mRNA sequence. | | | |
| | | GB_BA1: CARCG12 | 2079 | X14979 | C. aurantiacus reaction center genes 1 and 2. | Chloroflexus aurantiacus | 36,943 | 23-Apr-91 |
| rxa00704 | 750 | GB_EST15: AA497266 | 456 | AA497266 | fa04f08.s1 Zebrafish ICRFzfis Danio rerio cDNA clone 3A13 3′, mRNA sequence. | Danio rerio | 38,631 | 30-Jun-97 |
| | | GB_EST36: AI884217 | 515 | AI884217 | fc75e10.x1 Zebrafish WashU MPIMG EST Danio rerio cDNA 3′, mRNA sequence. | Danio rerio | 38,012 | 26-Jul-99 |
| | | GB_HTG1: CEY43F8_1 | 110000 | Z95393 | Caenorhabditis elegans chromosome V clone Y43F8, *** SEQUENCING IN | Caenorhabditis elegans | 37,889 | Z95393 |
| | | | | | PROGRESS ***, in unordered pieces. | | | |
| rxa00707 | 906 | GB_GSS8: AQ013755 | 715 | AQ013755 | RPCI11-23F24.TKBF RPCI-11 Homo sapiens genomic clone RPCI-11-23F24, | Homo sapiens | 41,724 | 14-Apr-99 |
| | | | | | genomic survey sequence. | | | |
| | | GB_GSS3: B86449 | 434 | B86449 | RPCI11-23F24.TV RPCI-11 Homo sapiens genomic clone RPCI-11-23F24, | Homo sapiens | 42,936 | 9-Apr-99 |
| | | | | | genomic survey sequence. | | | |
| | | GB_GSS5: AQ797072 | 449 | AQ797072 | nbxb0071D10f CUGI Rice BAC Library Oryza sativa genomic clone nbxb0071D10f, | Oryza sativa | 39,101 | 4-Aug-99 |
| | | | | | genomic survey sequence. | | | |
| rxa00712 | 819 | GB_BA2: AF011544 | 7527 | AF011544 | Bacillus subtilis phosphoribosylaminoimidazole-carboxamide formyltransferase | Bacillus subtilis | 36,927 | 06-OCT-1997 |
| | | | | | (purH-J) gene, partial cds, phosphoribosylglycinamide synthetase (purD), | | | |
| | | | | | YecA (yecA), putative adenine deaminase (yecB), YecC (yecC), and | | | |
| | | | | | YecD (yecD) genes, complete cds, and putative glutamate synthase | | | |
| | | | | | (yecE) gene, partial cds. | | | |
| | | GB_BA2: AF011544 | 7527 | AF011544 | Bacillus subtilis phosphoribosylaminoimidazole-carboxamide formyltransferase | Bacillus subtilis | 39,752 | 06-OCT-1997 |
| | | | | | (purH-J) gene, partial cds, phosphoribosylglycinamide synthetase (purD), | | | |
| | | | | | YecA (yecA), putative adenine deaminase (yecB), YecC (yecC), and | | | |
| | | | | | YecD (yecD) genes, complete cds, and putative glutamate synthase | | | |
| | | | | | (yecE) gene, partial cds. | | | |
| rxa00713 | 1056 | GB_PAT: I92037 | 241 | I92037 | Sequence 4 from patent U.S. Pat. No. 5726299. | Unknown. | 99,048 | 01-DEC-1998 |
| | | GB_PAT: I78748 | 241 | I78748 | Sequence 4 from patent U.S. Pat. No. 5693781. | Unknown. | 99,048 | 3-Apr-98 |
| | | GB_HTG3: AC009281 | 221178 | AC009281 | Homo sapiens chromosome 15 clone 8_C_22 map 15, *** SEQUENCING IN | Homo sapiens | 36,255 | 12-Aug-99 |
| | | | | | PROGRESS ***, 49 unordered pieces. | | | |
| rxa00714 | 684 | GB_PL1: CCR5839 | 871 | AJ005839 | Cyclotella cryptica mRNA for fucoxanthin chlorophyll a/c binding protein, fcp12. | Cyclotella cryptica | 36,364 | 30-Jul-98 |
| | | GB_PR2: HS1002M8 | 111768 | AL035454 | Human DNA sequence from clone 1002M8 on chromosome 20p11.21-11.23, | Homo sapiens | 36,444 | 23-Nov-99 |
| | | | | | complete sequence. | | | |
| | | GB_PR2: HS1002M8 | 111768 | AL035454 | Human DNA sequence from clone 1002M8 on chromosome 20p11.21-11.23, | Homo sapiens | 34,894 | 23-Nov-99 |
| | | | | | complete sequence. | | | |
| rxa00716 | 636 | GB_PAT: I78753 | 1187 | I78753 | Sequence 9 from patent U.S. Pat. No. 5693781. | Unknown. | 36,022 | 3-Apr-98 |
| | | GB_PAT: I92042 | 1187 | I92042 | Sequence 9 from patent U.S. Pat. No. 5726299. | Unknown. | 36,022 | 01-DEC-1998 |
| | | GB_HTG3: AC005769 | 200000 | AC005769 | Homo sapiens chromosome 4, *** SEQUENCING IN PROGRESS ***, | Homo sapiens | 36,745 | 21-Aug-99 |
| | | | | | 5 unordered pieces. | | | |
| rxa00719 | 1752 | GB_BA2: U32687 | 11847 | U32687 | Haemophilus influenzae Rd section 2 of 163 of the complete genome. | Haemophilus influenzae Rd | 36,937 | 29-MAY-1998 |
| | | GB_EST13: AA333602 | 357 | AA333602 | EST37710 Embryo, 8 week I Homo sapiens cDNA 5′ end similar to guanine | Homo sapiens | 45,938 | 21-Apr-97 |
| | | | | | nucleotide-binding protein rap2, ras-oncogene related, mRNA sequence. | | | |
| | | GB_BA2: U32687 | 11847 | U32687 | Haemophilus influenzae Rd section 2 of 163 of the complete genome. | Haemophilus influenzae Rd | 36,390 | 29-MAY-1998 |
| rxa00720 | 789 | GB_EST1: M61974 | 437 | M61974 | EST00024 Fetal brain, Stratagene (cat#936206) Homo sapiens cDNA | Homo sapiens | 40,138 | 26-MAY-1992 |
| | | | | | clone HFBA87, mRNA sequence. | | | |
| | | GB_EST3: R73776 | 389 | R73776 | yi55h07.r1 Soares placenta Nb2HP Homo sapiens cDNA | Homo sapiens | 41,818 | 5-Jun-95 |
| | | | | | clone IMAGE: 143197 5′, mRNA sequence. | | | |
| | | GB_EST35: AL043192 | 793 | AL043192 | DKFZp434G0723_r1 434 (synonym: htes3) Homo sapiens | Homo sapiens | 38,571 | 29-Sep-99 |
| | | | | | cDNA clone DKFZp434G0723 5′, mRNA sequence. | | | |
| rxa00722 | 1088 | GB_HTG3: AC008573 | 205755 | AC008573 | Homo sapiens chromosome 5 clone CIT-HSPC_551I11, | Homo sapiens | 38,506 | 3-Aug-99 |
| | | | | | *** SEQUENCING IN PROGRESS ***, 95 unordered pieces. | | | |
| | | GB_HTG3: AC008573 | 205755 | AC008573 | Homo sapiens chromosome 5 clone CIT-HSPC_551I11, | Homo sapiens | 38,506 | 3-Aug-99 |
| | | | | | *** SEQUENCING IN PROGRESS ***, 95 unordered pieces. | | | |
| | | GB_BA1: MTV014 | 58280 | AL021646 | Mycobacterium tuberculosis H37Rv complete genome; segment 137/162. | Mycobacterium | 41,392 | 18-Jun-98 |
| | | | | | | tuberculosis | | |
| rxa00724 | 2100 | GB_BA1: SC7A1 | 32039 | AL034447 | Streptomyces coelicolor cosmid 7A1. | Streptomyces coelicolor | 54,858 | 15-DEC-1998 |
| | | GB_BA1: BSY13937 | 27779 | Y13937 | Bacillus subtilis genomic DNA from the spoVM region. | Bacillus subtilis | 47,010 | 30-MAR-1998 |
| | | GB_BA2: L78127 | 1225 | L78127 | Enterococcus faecium genomic DNA fragment. | Enterococcus faecium | 36,880 | 18-Aug-99 |
| rxa00726 | 614 | GB_BA1: BACJH642 | 282700 | D84432 | Bacillus subtilis DNA, 283 Kb region containing skin element. | Bacillus subtilis | 56,694 | 6-Feb-99 |
| | | GB_BA1: BSUB0013 | 218470 | Z99116 | Bacillus subtilis complete genome (section 13 of 21): from 2395261 to 2613730. | Bacillus subtilis | 36,513 | 26-Nov-97 |
| | | GB_BA1: SC4H8 | 15560 | AL020958 | Streptomyces coelicolor cosmid 4H8. | Streptomyces coelicolor | 35,073 | 10-DEC-1997 |
| rxa00729 | | | | | | | | |
| rxa00730 | 930 | GB_HTG3: AC010758 | 145821 | AC010758 | Homo sapiens clone 1_B_18, | Homo sapiens | 35,738 | 22-Sep-99 |
| | | | | | *** SEQUENCING IN PROGRESS ***, 20 unordered pieces. | | | |
| | | GB_HTG3: AC010758 | 145821 | AC010758 | Homo sapiens clone 1_B_18, | Homo sapiens | 35,738 | 22-Sep-99 |
| | | | | | *** SEQUENCING IN PROGRESS ***, 20 unordered pieces. | | | |
| | | GB_GSS13: AQ469090 | 414 | AQ469090 | CITBI-E1-2596D12.TF CITBI-E1 Homo sapiens | Homo sapiens | 36,842 | 23-Apr-99 |
| | | | | | genomic clone 2596D12, genomic survey sequence. | | | |
| rxa00731 | 2619 | GB_BA1: CGLYSI | 4232 | X60312 | C. glutamicum lysl gene for L-lysine permease. | Corynebacterium | 100,000 | 30-Jan-92 |
| | | | | | | glutamicum | | |
| | | GB_BA1: CGLYSI | 4232 | X60312 | C. glutamicum lysl gene for L-lysine permease. | Corynebacterium | 37,645 | 30-Jan-92 |
| | | | | | | glutamicum | | |
| rxa00738 | 386 | GB_BA1: MTCY10G2 | 38970 | Z92539 | Mycobacterium tuberculosis H37Rv complete genome; segment 47/162. | Mycobacterium | 54,427 | 17-Jun-98 |
| | | | | | | tuberculosis | | |
| | | GB_HTG1: HSJ564F22 | 106277 | AL080249 | Homo sapiens chromosome 20 clone RP4-564F22, | Homo sapiens | 44,000 | 23-Nov-99 |
| | | | | | *** SEQUENCING IN PROGRESS ***, in unordered pieces. | | | |
| | | GB_HTG1: HSJ564F22 | 106277 | AL080249 | Homo sapiens chromosome 20 clone RP4-564F22, *** SEQUENCING | Homo sapiens | 44,000 | 23-Nov-99 |
| | | | | | IN PROGRESS ***, in unordered pieces. | | | |
| rxa00740 | 702 | GB_PL2: AF100167 | 1557 | AF100167 | Glycine max unknown mRNA. | Glycine max | 35,823 | 4-Nov-98 |
| | | GB_EST28: AI465702 | 268 | AI465702 | vw83g01.y1 Stratagene mouse skin (#937313) Mus musculus cDNA | Mus musculus | 43,226 | 09-MAR-1999 |
| | | | | | clone IMAGE: 1261584 5′, mRNA sequence. | | | |
| | | GB_EST20: AA856157 | 359 | AA856157 | vw83g01.r1 Stratagene mouse skin (#937313) Mus musculus cDNA | Mus musculus | 43,226 | 06-MAR-1998 |
| | | | | | clone IMAGE: 1261584 5′, mRNA sequence. | | | |
| rxa00741 | 1056 | GB_HTG2: AC007185 | 199340 | AC007185 | Drosophila melanogaster chromosome 2 clone BACR44N04 (D545) | Drosophila melanogaster | 39,583 | 2-Aug-99 |
| | | | | | RPCI-98 44.N.4 map 36A-36A strain y; cn bw sp, | | | |
| | | | | | *** SEQUENCING IN PROGRESS ***, 50 unordered pieces. | | | |
| | | GB_HTG2: AC007185 | 199340 | AC007185 | Drosophila melanogaster chromosome 2 clone BACR44N04 (D545) RPCI-98 | Drosophila melanogaster | 39,583 | 2-Aug-99 |
| | | | | | 44. N.4 map 36A-36A strain y; cn bw sp, *** SEQUENCING | | | |
| | | | | | IN PROGRESS***, 50 unordered pieces. | | | |
| | | GB_PL2: F17I23 | 134784 | AF160182 | Arabidopsis thaliana BAC F17I23. | Arabidopsis thaliana | 37,788 | 20-Jun-99 |
| rxa00742 | 1773 | GB_IN1: CEC05C10 | 26263 | Z48178 | Caenorhabditis elegans cosmid C05C10, complete sequence. | Caenorhabditis elegans | 39,243 | 2-Sep-99 |
| | | GB_IN1: CEC05C10 | 26263 | Z48178 | Caenorhabditis elegans cosmid C05C10, complete sequence. | Caenorhabditis elegans | 38,041 | 2-Sep-99 |
| rxa00743 | 546 | GB_GSS9: AQ093649 | 320 | AQ093649 | HS_3022_A1_E06_MR CIT Approved Human Genomic Sperm Library | Homo sapiens | 34,277 | 27-Aug-98 |
| | | | | | D Homo sapiens genomic clone Plate = 3022 Col = 11 Row = I, | | | |
| | | | | | genomic survey sequence. | | | |
| | | GB_GSS9: AQ093649 | 320 | AQ093649 | HS_3022_A1_E06_MR CIT Approved Human Genomic Sperm | Homo sapiens | 34,277 | 27-Aug-98 |
| | | | | | Library D Homo sapiens genomic clone Plate = 3022 Col = 11 Row = I, | | | |
| | | | | | genomic survey sequence. | | | |
| rxa00745 | 657 | GB_HTG2: AC008195 | 130309 | AC008195 | Drosophila melanogaster chromosome 3 clone BACR42I20 (D748) RPCI-98 | Drosophila melanogaster | 38,095 | 2-Aug-99 |
| | | | | | 42.I.20 map 93F-93F strain y; cn bw sp, *** SEQUENCING | | | |
| | | | | | IN PROGRESS ***, 77 unordered pieces. | | | |
| | | GB_IN2: DMU53190 | 3477 | U53190 | Drosophila melanogaster Camguk (cmg) mRNA, complete cds. | Drosophila melanogaster | 39,623 | 30-Nov-98 |
| | | GB_HTG2: AC008195 | 130309 | AC008195 | Drosophila melanogaster chromosome 3 clone BACR42I20 (D748) | Drosophila melanogaster | 38,095 | 2-Aug-99 |
| | | | | | RPCI-98 42.I.20 map 93F-93F strain y; cn bw sp, *** SEQUENCING | | | |
| | | | | | IN PROGRESS ***, 77 unordered pieces. | | | |
| rxa00746 | 1314 | GB_HTG3: AC010076 | 148614 | AC010076 | Homo sapiens chromosome 15 clone | Homo sapiens | 36,336 | 11-Sep-99 |
| | | | | | BAC 64K10 map 14q25, LOW-PASS SEQUENCE SAMPLING. | | | |
| | | GB_HTG3: AC010076 | 148614 | AC010076 | Homo sapiens chromosome 15 clone BAC 64K10 map | Homo sapiens | 36,336 | 11-Sep-99 |
| | | | | | 14q25, LOW-PASS SEQUENCE SAMPLING. | | | |
| | | GB_PR3: HS402G11 | 177241 | AL022328 | Human DNA sequence from clone 402G11 on chromosome | Homo sapiens | 38,752 | 23-Nov-99 |
| | | | | | 22q13.31-13.33 Contains genes for SAPK3 (stress-activated protein kinase 3), | | | |
| | | | | | PRKM11 (protein kinase mitogen-activated 11), | | | |
| | | | | | KIAA0315, ESTs, GSSs and CpG islands, complete sequence. | | | |
| rxa00747 | 711 | GB_HTG4: AC010081 | 176777 | AC010081 | Homo sapiens clone NH0065E07, *** SEQUENCING IN | Homo sapiens | 37,016 | 29-OCT-1999 |
| | | | | | PROGRESS ***, 1 unordered pieces. | | | |
| | | GB_HTG4: AC010081 | 176777 | AC010081 | Homo sapiens clone NH0065E07, *** SEQUENCING IN | Homo sapiens | 37,016 | 29-OCT-1999 |
| | | | | | PROGRESS ***, 1 unordered pieces. | | | |
| | | GB_HTG3: AC011194 | 196098 | AC011194 | Mus musculus chromosome 11 clone 196_F_5 map 11, *** SEQUENCING | Mus musculus | 38,735 | 01-OCT-1999 |
| | | | | | IN PROGRESS ***, 32 unordered pieces. | | | |
| rxa00748 | 567 | GB_GSS13: AQ457887 | 478 | AQ457887 | HS_5189_B2_B06_SP6E RPCI-11 Human Male BAC Library | Homo sapiens | 37,844 | 23-Apr-99 |
| | | | | | Homo sapiens genomic clone Plate = 765 | | | |
| | | | | | Col = 12 Row = D, genomic survey sequence. | | | |
| | | GB_IN1: EHEXRIDRI | 170 | X58630 | E. histolytica extrachromosomal ribosomal DNA for DRA I repeat unit. | Entamoeba histolytica | 42,353 | 13-Aug-91 |
| | | GB_IN1: EHEXRDNA | 3699 | X61182 | E. histolytica extrachromosomal ribosomal DNA downstream of rRNA genes. | Entamoeba histolytica | 38,905 | 2-Sep-96 |
| rxa00749 | 822 | GB_BA1: BSUB0003 | 209100 | Z99106 | Bacillus subtilis complete genome (section 3 of 21): from 402751 to 611850. | Bacillus subtilis | 37,238 | 26-Nov-97 |
| | | GB_BA1: AB001488 | 148068 | AB001488 | Bacillus subtilis genome sequence, 148 kb sequence of the region | Bacillus subtilis | 37,238 | 13-Feb-99 |
| | | | | | between 35 and 47 degree. | | | |
| | | GB_HTG3: AC008060 | 161486 | AC008060 | Homo sapiens clone DJ0912I13, *** SEQUENCING IN | Homo sapiens | 39,474 | 13-Aug-99 |
| | | | | | PROGRESS ***, 4 unordered pieces. | | | |
| rxa00750 | | | | | | | | |
| rxa00751 | 951 | GB_PR4: AC006449 | 286758 | AC006449 | Homo sapiens chromosome 17, clone hCIT.58_E_17, complete sequence. | Homo sapiens | 38,223 | 23-OCT-1999 |
| | | GB_HTG2: AC002118 | 170891 | AC002118 | Homo sapiens chromosome 17 clone 303_E_14, *** SEQUENCING | Homo sapiens | 37,112 | 13-Feb-98 |
| | | | | | IN PROGRESS ***, 20 unordered pieces. | | | |
| | | GB_HTG2: AC002118 | 170891 | AC002118 | Homo sapiens chromosome 17 clone 303_E_14, *** SEQUENCING | Homo sapiens | 37,112 | 13-Feb-98 |
| | | | | | IN PROGRESS ***, 20 unordered pieces. | | | |
| rxa00752 | 552 | GB_PL2: F5K24 | 109786 | AF128395 | Arabidopsis thaliana BAC F5K24. | Arabidopsis thaliana | 38,899 | 03-MAR-1999 |
| | | GB_BA1: MBHRDED | 6300 | Y09870 | M. barkeri hdrE & hdrD genes, ORF1, ORF2, ORF3 & ORF4. | Methanosarcina barkeri | 40,609 | 04-DEC-1998 |
| | | GB_PL1: SC9920 | 23498 | Z48639 | S. cerevisiae chromosome XIII cosmid 9920. | Saccharomyces cerevisiae | 35,754 | 11-Aug-97 |
| rxa00757 | 1377 | GB_PAT: E13655 | 2260 | E13655 | gDNA encoding glucose-6-phosphate dehydrogenase. | Corynebacterium | 46,045 | 24-Jun-98 |
| | | | | | | glutamicum | | |
| | | GB_GSS9: AQ103710 | 369 | AQ103710 | HS_3092_B1_C01_MF CIT Approved Human Genomic Sperm Library D | Homo sapiens | 36,339 | 27-Aug-98 |
| | | | | | Homo sapiens genomic clone Plate = 3092 | | | |
| | | | | | Col = 1 Row = F, genomic survey sequence. | | | |
| | | GB_HTG3: AC009305 | 167705 | AC009305 | Homo sapiens clone NH0153B21, *** SEQUENCING IN | Homo sapiens | 36,691 | 13-Aug-99 |
| | | | | | PROGRESS ***, 3 unordered pieces. | | | |
| rxa00763 | 906 | GB_BA1: SC7B7 | 13800 | AL009199 | Streptomyces coelicolor cosmid 7B7. | Streptomyces coelicolor | 39,013 | 02-DEC-1997 |
| | | GB_HTG2: HSJ473J16 | 203460 | AL109942 | Homo sapiens chromosome 6 clone RP3-473J16 map q25.3-26, | Homo sapiens | 38,192 | 03-DEC-1999 |
| | | | | | *** SEQUENCING IN PROGRESS ***, in unordered pieces. | | | |
| | | GB_HTG2: HSJ473J16 | 203460 | AL109942 | Homo sapiens chromosome 6 clone RP3-473J16 map q25.3-26, | Homo sapiens | 38,192 | 03-DEC-1999 |
| | | | | | *** SEQUENCING IN PROGRESS ***, in unordered pieces. | | | |
| rxa00765 | 810 | GB_BA1: MTV043 | 68848 | AL022004 | Mycobacterium tuberculosis H37Rv complete genome; segment 40/162. | Mycobacterium | 38,568 | 24-Jun-99 |
| | | | | | | tuberculosis | | |
| | | GB_BA2: PAU93274 | 8008 | U93274 | Pseudomonas aeruginosa YafE (yafE), LeuB (leuB), Asd (asd), FimV (fimV), | Pseudomonas aeruginosa | 37,656 | 23-Jun-98 |
| | | | | | and HisT (hisT) genes, complete cds; TrpF (trpF) gene, partial cds; and unknown gene. | | | |
| | | GB_BA1: MTCY31 | 37630 | Z73101 | Mycobacterium tuberculosis H37Rv complete genome; segment 41/162. | Mycobacterium | 38,209 | 17-Jun-98 |
| | | | | | | tuberculosis | | |
| rxa00768 | 1242 | GB_HTG5: AC008194 | 194555 | AC008194 | Drosophila melanogaster chromosome X clone BACR49A05 (D745) | Drosophila melanogaster | 34,078 | 15-Nov-99 |
| | | | | | RPCI-98 49.A.5 map 18A-18A strain y; cn bw sp, *** SEQUENCING | | | |
| | | | | | IN PROGRESS ***, 90 unordered pieces. | | | |
| | | GB_HTG5: AC008194 | 194555 | AC008194 | Drosophila melanogaster chromosome X clone BACR49A05 (D745) | Drosophila melanogaster | 31,194 | 15-Nov-99 |
| | | | | | RPCI-98 49.A.5 map 18A-18A strain y; cn bw sp, *** SEQUENCING | | | |
| | | | | | IN PROGRESS ***, 90 unordered pieces. | | | |
| | | GB_BA2: AF044495 | 9599 | AF044495 | Agrobacterium tumefaciens chemotaxis operon, complete sequence. | Agrobacterium tumefaciens | 40,165 | 2-Jul-98 |
| rxa00769 | 336 | GB_PR3: AC003068 | 42184 | AC003068 | Human Cosmid g5129z059 from 7q31.3, complete sequence. | Homo sapiens | 35,152 | 6-Nov-97 |
| | | GB_PR2: HSAC000374 | 41585 | AC000374 | Human cosmid g1980a170, complete sequence. | Homo sapiens | 35,152 | 12-MAR-1997 |
| | | GB_PR3: AC003068 | 42184 | AC003068 | Human Cosmid g5129z059 from 7q31.3, complete sequence. | Homo sapiens | 37,309 | 6-Nov-97 |
| rxa00771 | 942 | GB_PR2: HS172K2 | 131234 | Z84814 | Human DNA sequence from PAC 172K2 on chromosome 6 contains | Homo sapiens | 34,719 | 23-Nov-99 |
| | | | | | HLA CLASS II DRA pseudogene, DRB3*01012 genes, DRB9 | | | |
| | | | | | pseudogene butyrophilin precursor and ESTs. | | | |
| | | GB_HTG1: HSA555E18 | 1177 | AL121780 | Homo sapiens chromosome 20 clone RP11-555E18, *** SEQUENCING IN | Homo sapiens | 41,450 | 23-Nov-99 |
| | | | | | PROGRESS ***, in unordered pieces. | | | |
| | | GB_HTG1: HSA555E18 | 1177 | AL121780 | Homo sapiens chromosome 20 clone RP11-555E18, *** SEQUENCING | Homo sapiens | 41,450 | 23-Nov-99 |
| | | | | | IN PROGRESS ***, in unordered pieces. | | | |
| rxa00781 | 411 | GB_PR3: HS48A11 | 129294 | AL031132 | Human DNA sequence from clone 48A11 on chromosome 20p12 | Homo sapiens | 37,284 | 23-Nov-99 |
| | | | | | Contains EST, STS, GSS, complete sequence. | | | |
| | | GB_IN1: CELC03B1 | 42297 | U40952 | Caenorhabditis elegans cosmid C03B1. | Caenorhabditis elegans | 38,177 | 25-Nov-95 |
| | | GB_PR3: HS48A11 | 129294 | AL031132 | Human DNA sequence from clone 48A11 on chromosome 20p12 | Homo sapiens | 35,162 | 23-Nov-99 |
| | | | | | Contains EST, STS, GSS, complete sequence. | | | |
| rxa00785 | 680 | GB_EST11: AA223451 | 349 | AA223451 | zr06d01.r1 Stratagene NT2 neuronal precursor 937230 Homo sapiens cDNA | Homo sapiens | 38,682 | 19-Feb-97 |
| | | | | | clone IMAGE: 650689 5′, mRNA sequence. | | | |
| | | GB_EST9: AA081255 | 446 | AA081255 | zn33d08.r1 Stratagene endothelial cell 937223 Homo sapiens cDNA clone IMAGE: | Homo sapiens | 40,271 | 21-OCT-1996 |
| | | | | | 549231 5′, mRNA sequence. | | | |
| | | GB_EST9: C16722 | 314 | C16722 | C16722 Clontech human aorta polyA+ mRNA (#6572) Homo sapiens cDNA clone | Homo sapiens | 44,013 | 30-Sep-96 |
| | | | | | GEN-522C02 5′, mRNA sequence. | | | |
| rxa00788 | 348 | GB_PL2: UMU62738 | 13812 | U62738 | Ustilago maydis ferrichrome siderophore peptide synthetase (sid2) gene, complete cds. | Ustilago maydis | 31,792 | 30-DEC-1997 |
| | | GB_PR1: AB012723 | 40850 | AB012723 | Homo sapiens gene for kinesin-like protein, complete cds. | Homo sapiens | 35,398 | 8-Jan-99 |
| | | GB_HTG3: AC008625 | 16830 | AC008625 | Homo sapiens chromosome 5 clone CIT978SKB_157D17, *** SEQUENCING | Homo sapiens | 42,560 | 3-Aug-99 |
| | | | | | IN PROGRESS ***, 19 unordered pieces. | | | |
| rxa00795 | 651 | GB_IN2: AC003120 | 59991 | AC003120 | Drosophila melanogaster DNA sequence (P1 DS01523 (D34)), complete sequence. | Drosophila melanogaster | 39,252 | 17-Jul-98 |
| | | GB_EST19: AA802212 | 574 | AA802212 | GM04027.5 prime GM Drosophila melanogaster ovary BlueScript | Drosophila melanogaster | 37,828 | 25-Nov-98 |
| | | | | | Drosophila melanogaster cDNA clone GM04027 5prime, mRNA sequence. | | | |
| | | GB_IN2: AF168467 | 4652 | AF168467 | Drosophila melanogaster dual specificity kinase DYRK2 mRNA, complete cds. | Drosophila melanogaster | 36,933 | 5-Aug-99 |
| rxa00804 | 567 | GB_GSS12: AQ356039 | 499 | AQ356039 | CITBI-E1-2535P11.TR CITBI-E1 Homo sapiens genomic clone | Homo sapiens | 40,569 | 24-Jan-99 |
| | | | | | 2535P11, genomic survey sequence. | | | |
| | | GB_PR4: AC005037 | 190508 | AC005037 | Homo sapiens clone NH0469M07, complete sequence. | Homo sapiens | 41,209 | 14-MAY-1999 |
| | | GB_HTG5: AC007272 | 175463 | AC007272 | Homo sapiens clone NH0013J08, *** SEQUENCING IN | Homo sapiens | 41,209 | 2-Nov-99 |
| | | | | | PROGRESS ***, 5 unordered pieces. | | | |
| rxa00805 | 1005 | GB_GSS1: CNS00U61 | 320 | AL090583 | Arabidopsis thaliana genome survey sequence SP6 end of BAC T6D17 of TAMU | Arabidopsis thaliana | 36,364 | 28-Jun-99 |
| | | | | | library from strain Columbia of | | | |
| | | | | | Arabidopsis thaliana, genomic survey sequence. | | | |
| | | GB_PL1: AB026639 | 63921 | AB026639 | Arabidopsis thaliana genomic DNA, chromosome 5, TAC clone: | Arabidopsis thaliana | 38,485 | 07-MAY-1999 |
| | | | | | K21L13, complete sequence. | | | |
| | | GB_PL1: AB026639 | 63921 | AB026639 | Arabidopsis thaliana genomic DNA, chromosome 5, TAC clone: | Arabidopsis thaliana | 35,451 | 07-MAY-1999 |
| | | | | | K21L13, complete sequence. | | | |
| rxa00808 | 1581 | GB_BA1: MLCB2548 | 38916 | AL023093 | Mycobacterium leprae cosmid B2548. | Mycobacterium leprae | 50,854 | 27-Aug-99 |
| | | GB_BA1: MLCL373 | 37304 | AL035500 | Mycobacterium leprae cosmid L373. | Mycobacterium leprae | 40,295 | 27-Aug-99 |
| | | GB_PL2: SCE9781 | 68302 | U18916 | Saccharomyces cerevisiae chromosome V cosmids 9781, 8198, 9115, | Saccharomyces cerevisiae | 37,677 | 1-Aug-97 |
| | | | | | 9981, and lambda clones 3955 and 6052. | | | |
| rxa00812 | 1182 | GB_HTG2: AC006003 | 114949 | AC006003 | Homo sapiens clone DJ0782K24, *** SEQUENCING IN | Homo sapiens | 35,284 | 22-Nov-98 |
| | | | | | PROGRESS ***, 16 unordered pieces. | | | |
| | | GB_HTG2: AC006003 | 114949 | AC006003 | Homo sapiens clone DJ0782K24, *** SEQUENCING IN | Homo sapiens | 35,284 | 22-Nov-98 |
| | | | | | PROGRESS ***, 16 unordered pieces. | | | |
| | | GB_GSS9: AQ090529 | 323 | AQ090529 | HS_3007_B1_E09_MR CIT Approved Human Genomic Sperm | Homo sapiens | 41,176 | 26-Aug-98 |
| | | | | | Library D Homo sapiens genomic clone Plate = 3007 Col = 17 | | | |
| | | | | | Row = J, genomic survey sequence. | | | |
| rxa00814 | 897 | GB_VI: EHVU20824 | 184427 | U20824 | Equine herpesvirus 2, complete genome. | Equine herpesvirus 2 | 35,274 | 2-Feb-96 |
| | | GB_VI: EHVU20824 | 184427 | U20824 | Equine herpesvirus 2, complete genome. | Equine herpesvirus 2 | 38,808 | 2-Feb-96 |
| | | GB_PR3: HS466N1 | 79528 | Z97630 | Human DNA sequence from clone 466N1 on chromosome 22q12-13 Contains | Homo sapiens | 38,496 | 23-Nov-99 |
| | | | | | H1F0(H1 histone family, member 0) gene, 2-amino-3-ketobutyrate-CoA | | | |
| | | | | | ligase(nuclear gene encoding mitochondrial | | | |
| | | | | | protein), GALR3 (galanin receptor) gene, ESTs, | | | |
| | | | | | GSSs and CpG islands, complete sequence. | | | |
| rxa00815 | 696 | GB_PR3: CNS01DRL | 174928 | AL117355 | Human chromosome 14 DNA sequence *** IN PROGRESS *** BAC | Homo sapiens | 36,578 | 26-Nov-99 |
| | | | | | R-354E14 of RPCI-11 library from chromosome 14 of | | | |
| | | | | | Homo sapiens (Human), complete sequence. | | | |
| | | GB_PR4: AC007283 | 127361 | AC007283 | Homo sapiens clone NH0536I18, complete sequence. | Homo sapiens | 37,609 | 28-Sep-99 |
| | | GB_EST14: AA406984 | 477 | AA406984 | MBAFCZ7H08T3 Brugia malayi adult female cDNA (SAW96MLW-BmAF) | Brugia malayi | 41,919 | 01-MAY-1997 |
| | | | | | Brugia malayi cDNA clone AFCZ7H08 5′, mRNA sequence. | | | |
| rxa00816 | 420 | GB_EST27: AI414036 | 467 | AI414036 | ma03e08.x1 Soares mouse p3NMF19.5 Mus musculus cDNA clone IMAGE: | Mus musculus | 40,176 | 9-Feb-99 |
| | | | | | 303494 3′ similar to TR: Q85299 Q85299 HOMOLOGUE OF | | | |
| | | | | | RETROVIRAL PSEUDOPROTEASE.;, mRNA sequence. | | | |
| | | GB_GSS15: AQ642295 | 501 | AQ642295 | RPCI93-Dpnll-28G21.TV RPCI93-Dpnll Trypanosoma brucei genomic clone | Trypanosoma brucei | 37,540 | 8-Jul-99 |
| | | | | | RPCI93-Dpnll-28G21, genomic survey sequence. | | | |
| | | GB_PL2: ZMU82481 | 2750 | U82481 | Zea mays KI domain interacting kinase 1 (KIK1) mRNA, complete cds. | Zea mays | 41,783 | 1-Jan-98 |
| rxa00826 | 654 | GB_PR4: AC008179 | 181745 | AC008179 | Homo sapiens clone NH0576F01, complete sequence. | Homo sapiens | 35,736 | 28-Sep-99 |
| | | GB_HTG1: AC002413 | 63369 | AC002413 | Homo sapiens chromosome X clone bWXD111, *** SEQUENCING IN | Homo sapiens | 37,600 | 12-Aug-97 |
| | | | | | PROGRESS ***, 2 unordered pieces. | | | |
| | | GB_HTG1: AC002413 | 63369 | AC002413 | Homo sapiens chromosome X clone bWXD111, *** SEQUENCING IN | Homo sapiens | 37,600 | 12-Aug-97 |
| | | | | | PROGRESS ***, 2 unordered pieces. | | | |
| rxa00830 | 846 | GB_GSS6: AQ823465 | 535 | AQ823465 | HS_3217_A1_D08_T7C CIT Approved Human Genomic Sperm Library | Homo sapiens | 40,417 | 26-Aug-99 |
| | | | | | D Homo sapiens genomic clone Plate = 3217 Col = 15 | | | |
| | | | | | Row = G, genomic survey sequence. | | | |
| | | GB_GSS6: AQ825402 | 381 | AQ825402 | HS_5498_A1_G01_SP6E RPCI-11 Human Male BAC Library | Homo sapiens | 43,068 | 26-Aug-99 |
| | | | | | Homo sapiens genomic clone Plate = 1074 Col = 1 | | | |
| | | | | | Row = M, genomic survey sequence. | | | |
| | | GB_HTG1: HSU242F8 | 92944 | AL022167 | Homo sapiens chromosome X clone LL0XNC01-242F8, *** SEQUENCING | Homo sapiens | 38,321 | 23-Nov-99 |
| | | | | | IN PROGRESS ***, in unordered pieces. | | | |
| rxa00831 | | | | | | | | |
| rxa00835 | 1077 | GB_EST35: AI864917 | 468 | AI864917 | wj66f11.x1 NCI_CGAP_Lu19 Homo sapiens cDNA clone IMAGE: | Homo sapiens | 37,607 | 30-Aug-99 |
| | | | | | 2407821 3′ similar to WP: F01F1.9 CE01235 | | | |
| | | | | | VACUOLAR AMINOPEPTIDASE;, mRNA sequence. | | | |
| | | GB_EST35: AI864917 | 468 | AI864917 | wj66f11.x1 NCI_CGAP_Lu19 Homo sapiens cDNA clone IMAGE: | Homo sapiens | 38,444 | 30-Aug-99 |
| | | | | | 2407821 3′ similar to WP: F01F1.9 CE01235 | | | |
| | | | | | VACUOLAR AMINOPEPTIDASE;, mRNA sequence. | | | |
| rxa00836 | 1816 | GB_EST11: AA212728 | 424 | AA212728 | mw81g02.r1 Soares mouse NML Mus musculus cDNA clone IMAGE: | Mus musculus | 40,284 | 18-Feb-97 |
| | | | | | 677138 5′, mRNA sequence. | | | |
| | | GB_EST26: AI390258 | 557 | AI390258 | mw81g02.y1 Soares mouse NML Mus musculus cDNA clone IMAGE: | Mus musculus | 41,261 | 2-Feb-99 |
| | | | | | 677138 5′, mRNA sequence. | | | |
| | | GB_PR3: AC003669 | 159446 | AC003669 | Homo sapiens Xp22 BAC GS-594A7 (Genome Systems Human BAC | Homo sapiens | 34,914 | 24-MAR-1998 |
| | | | | | library) contains Bmx gene, complete sequence. | | | |
| rxa00840 | | | | | | | | |
| rxa00841 | | | | | | | | |
| rxa00846 | 993 | GB_BA1: U00017 | 42157 | U00017 | Mycobacterium leprae cosmid B2126. | Mycobacterium leprae | 35,635 | 01-MAR-1994 |
| | | GB_BA1: MLCB2533 | 40245 | AL035310 | Mycobacterium leprae cosmid B2533. | Mycobacterium leprae | 38,280 | 27-Aug-99 |
| | | GB_RO: AB022047S7 | 18721 | AB022053 | Mus musculus gene for prolyl oligopeptidase, exon | Mus musculus | 36,633 | 20-Aug-99 |
| | | | | | 11, 12, 13, 14, 15 and complete cds. | | | |
| rxa00853 | 726 | GB_PR3: HS531H16 | 155116 | AL031664 | Human DNA sequence *** SEQUENCING IN PROGRESS *** from | Homo sapiens | 41,110 | 23-Nov-99 |
| | | | | | clone 531H16, complete sequence. | | | |
| | | GB_PR3: HS531H16 | 155116 | AL031664 | Human DNA sequence *** SEQUENCING IN PROGRESS *** from | Homo sapiens | 37,343 | 23-Nov-99 |
| | | | | | clone 531H16, complete sequence. | | | |
| | | GB_HTG3: AC010264 | 81671 | AC010264 | Homo sapiens chromosome 5 clone CIT-HSPC_468K18, *** SEQUENCING | Homo sapiens | 38,776 | 15-Sep-99 |
| | | | | | IN PROGRESS ***, 66 unordered pieces. | | | |
| rxa00854 | 336 | GB_IN1: CELM04G7 | 41778 | AF036700 | Caenorhabditis elegans cosmid M04G7. | Caenorhabditis elegans | 37,349 | 05-DEC-1997 |
| | | GB_EST20: AA850405 | 451 | AA850405 | EST193172 Normalized rat ovary, Bento Soares Rattus sp. cDNA clone | Rattus sp. | 40,789 | 30-Apr-98 |
| | | | | | ROVAF27 3′ end, mRNA sequence. | | | |
| | | GB_HTG2: AF165144 | 110891 | AF165144 | Homo sapiens chromosome 8 clone BAC 393A07 map 8q, *** SEQUENCING | Homo sapiens | 34,234 | 16-Jul-99 |
| | | | | | IN PROGRESS ***, in ordered pieces. | | | |
| rxa00855 | 408 | GB_HTG2: AC007173 | 140775 | AC007173 | Drosophila melanogaster chromosome 2 clone BACR01A03 (D538) | Drosophila melanogaster | 36,341 | 2-Aug-99 |
| | | | | | RPCI-98 01.A.3 map 36E-36E strain y; cn bw sp, *** SEQUENCING | | | |
| | | | | | IN PROGRESS ***, 36 unordered pieces. | | | |
| | | GB_HTG2: AC007173 | 140775 | AC007173 | Drosophila melanogaster chromosome 2 clone BACR01A03 (D538) | Drosophila melanogaster | 36,341 | 2-Aug-99 |
| | | | | | RPCI-98 01.A.3 map 36E-36E strain y; cn bw sp, *** SEQUENCING | | | |
| | | | | | IN PROGRESS ***, 36 unordered pieces. | | | |
| | | GB_PL2: YSCH8179 | 44113 | U00062 | Saccharomyces cerevisiae chromosome VIII cosmid 8179. | Saccharomyces cerevisiae | 38,560 | 4-Sep-97 |
| rxa00861 | 426 | GB_BA1: CGORF4GEN | 2398 | X95649 | C. glutamicum ORF4 gene. | Corynebacterium | 100,000 | 10-MAR-1998 |
| | | | | | | glutamicum | | |
| | | GB_BA1: SC9A10 | 9000 | AL031260 | Streptomyces coelicolor cosmid 9A10. | Streptomyces coelicolor | 63,830 | 11-Aug-98 |
| | | GB_BA2: AF039028 | 2475 | AF039028 | Streptomyces toyocaensis D-ala-D-ala dipeptidase (vanXst) gene, | Streptomyces toyocaensis | 61,939 | 5-Jan-99 |
| | | | | | complete cds; and unknown gene. | | | |
| rxa00862 | 682 | GB_PAT: E14520 | 2001 | E14520 | DNA encoding Brevibacterium dihydrodipicolinic acid synthase. | Corynebacterium | 36,154 | 28-Jul-99 |
| | | | | | | glutamicum | | |
| | | GB_PAT: E12773 | 2001 | E12773 | DNA encoding Brevibacterium dihydrodipicolinic acid reductase. | Corynebacterium | 36,154 | 24-Jun-98 |
| | | | | | | glutamicum | | |
| | | GB_PAT: E16749 | 2001 | E16749 | gDNA encoding dihydrodipicolinate synthase (DDPS). | Corynebacterium | 36,154 | 28-Jul-99 |
| | | | | | | glutamicum | | |
| rxa00869 | 1044 | GB_EST24: AI166579 | 645 | AI166579 | xylem.est.398 Poplar xylem Lambda ZAPII library Populus balsamifera subsp. | Populus balsamifera | 39,854 | 03-DEC-1998 |
| | | | | | trichocarpa cDNA 5′, mRNA sequence. | subsp. trichocarpa | | |
| | | GB_BA1: MTCY06H11 | 38000 | Z85982 | Mycobacterium tuberculosis H37Rv complete genome; segment 73/162. | Mycobacterium | 42,801 | 17-Jun-98 |
| | | | | | | tuberculosis | | |
| | | GB_EST34: AV153098 | 283 | AV153098 | AV153098 Mus musculus hippocampus C57BL/6J adult Mus musculus | Mus musculus | 39,576 | 7-Jul-99 |
| | | | | | cDNA clone 2900052L10, mRNA sequence. | | | |
| rxa00874 | 1212 | GB_HTG2: AC007885 | 108561 | AC007885 | Drosophila melanogaster chromosome 2 clone BACR02G15 (D643) RPCI-98 | Drosophila melanogaster | 38,276 | 2-Aug-99 |
| | | | | | 02.G.15 map 60F-60F strain y; cn bw sp, *** SEQUENCING | | | |
| | | | | | IN PROGRESS ***, 65 unordered pieces. | | | |
| | | GB_HTG2: AC007582 | 127205 | AC007582 | Drosophila melanogaster chromosome 2 clone BACR17E16 (D642) RPCI-98 | Drosophila melanogaster | 36,246 | 2-Aug-99 |
| | | | | | 17.E.16 map 60F-60F strain y; cn bw sp, *** SEQUENCING | | | |
| | | | | | IN PROGRESS ***, 81 unordered pieces. | | | |
| | | GB_HTG2: AC007885 | 108561 | AC007885 | Drosophila melanogaster chromosome 2 clone BACR02G15 (D643) RPCI-98 | Drosophila melanogaster | 38,276 | 2-Aug-99 |
| | | | | | 02.G.15 map 60F-60F strain y; cn bw sp, *** SEQUENCING | | | |
| | | | | | IN PROGRESS ***, 65 unordered pieces. | | | |
| rxa00876 | 1878 | GB_EST10: AA144736 | 479 | AA144736 | mr72d08.r1 Stratagene mouse testis (#937308) Mus musculus cDNA | Mus musculus | 41,474 | 11-Feb-97 |
| | | | | | clone IMAGE: 602991 5′, mRNA sequence. | | | |
| | | GB_EST32: AU069076 | 316 | AU069076 | AU069076 Rice callus Oryza sativa cDNA clone C51993_1A, mRNA sequence. | Oryza sativa | 46,330 | 7-Jun-99 |
| | | GB_EST10: AA144736 | 479 | AA144736 | mr72d08.r1 Stratagene mouse testis (#937308) Mus musculus cDNA | Mus musculus | 43,243 | 11-Feb-97 |
| | | | | | clone IMAGE: 602991 5′, mRNA sequence. | | | |
| rxa00881 | 501 | GB_HTG4: AC010103 | 192320 | AC010103 | Homo sapiens chromosome unknown clone NH0508H21, WORKING | Homo sapiens | 36,620 | 29-OCT-1999 |
| | | | | | DRAFT SEQUENCE, in unordered pieces. | | | |
| | | GB_HTG4: AC010103 | 192320 | AC010103 | Homo sapiens chromosome unknown clone NH0508H21, WORKING | Homo sapiens | 36,620 | 29-OCT-1999 |
| | | | | | DRAFT SEQUENCE, in unordered pieces. | | | |
| | | GB_HTG4: AC010103 | 192320 | AC010103 | Homo sapiens chromosome unknown clone NH0508H21, WORKING | Homo sapiens | 34,280 | 29-OCT-1999 |
| | | | | | DRAFT SEQUENCE, in unordered pieces. | | | |
| rxa00882 | 801 | GB_BA1: MTCY48 | 35377 | Z74020 | Mycobacterium tuberculosis H37Rv complete genome; segment 69/162. | Mycobacterium | 37,927 | 17-Jun-98 |
| | | | | | | tuberculosis | | |
| | | GB_PAT: AR005211 | 3453 | AR005211 | Sequence 1 from patent U.S. Pat. No.5747651. | Unknown. | 39,620 | 04-DEC-1998 |
| | | GB_PAT: I40600 | 3453 | I40600 | Sequence 1 from patent U.S. Pat. No.5621090. | Unknown. | 39,620 | 13-MAY-1997 |
| rxa00883 | 642 | GB_PR2: HS217O16 | 87552 | AL031771 | Human DNA sequence from clone 217O16 on chromosome 6q24 | Homo sapiens | 33,866 | 23-Nov-99 |
| | | | | | Contains GSS, complete sequence. | | | |
| | | GB_PR2: HS217O16 | 87552 | AL031771 | Human DNA sequence from clone 217O16 on chromosome | Homo sapiens | 35,479 | 23-Nov-99 |
| | | | | | 6q24 Contains GSS, complete sequence. | | | |
| rxa00887 | | | | | | | | |
| rxa00889 | 711 | GB_BA1: MTCY27 | 27548 | Z95208 | Mycobacterium tuberculosis H37Rv complete genome; segment 104/162. | Mycobacterium | 36,978 | 17-Jun-98 |
| | | | | | | tuberculosis | | |
| | | GB_BA1: U00016 | 42931 | U00016 | Mycobacterium leprae cosmid B1937. | Mycobacterium leprae | 55,651 | 01-MAR-1994 |
| | | GB_PR4: AC007326 | 102898 | AC007326 | Homo sapiens, complete sequence. | Homo sapiens | 40,205 | 2-Nov-99 |
| rxa00893 | 720 | GB_PL1: HVCPMII | 6225 | Y09602 | H. vulgare gene encoding serine carboxypeptidase II, CP-MII. | Hordeum vulgare | 35,704 | 10-MAR-1997 |
| | | GB_EST35: AI814621 | 441 | AI814621 | wj75d04.x1 NCI_CGAP_Lu19 Homo sapiens cDNA clone IMAGE: 2408647 | Homo sapiens | 37,788 | 24-Aug-99 |
| | | | | | 3′ similar to TR: O00578 O00578 KIAA0167. [1];, mRNA sequence. | | | |
| | | GB_EST3: R51723 | 376 | R51723 | yg77h06.r1 Soares infant brain 1NIB Homo sapiens cDNA clone IMAGE: | Homo sapiens | 41,489 | 18-MAY-1995 |
| | | | | | 39671 5′ similar to gb: M77016 TROPOMODULIN (HUMAN);, mRNA sequence. | | | |
| rxa00895 | 714 | GB_HTG3: AC009414 | 188673 | AC009414 | Homo sapiens clone NH0490M08, *** SEQUENCING IN | Homo sapiens | 36,775 | 17-Sep-99 |
| | | | | | PROGRESS ***, 5 unordered pieces. | | | |
| | | GB_HTG3: AC009414 | 188673 | AC009414 | Homo sapiens clone NH0490M08, *** SEQUENCING IN | Homo sapiens | 36,775 | 17-Sep-99 |
| | | | | | PROGRESS ***, 5 unordered pieces. | | | |
| | | GB_PR3: HSJ824F16 | 139330 | AL050325 | Human DNA sequence from clone 824F16 on chromosome 20, complete sequence. | Homo sapiens | 37,286 | 23-Nov-99 |
| rxa00904 | 815 | GB_HTG5: AC006447 | 141662 | AC006447 | Mus musculus, *** SEQUENCING IN PROGRESS ***, 2 unordered pieces. | Mus musculus | 35,945 | 17-Nov-99 |
| | | GB_HTG5: AC011064 | 233428 | AC011064 | Drosophila melanogaster chromosome X clone BACN05G06 (D1107) | Drosophila melanogaster | 37,783 | 16-Nov-99 |
| | | | | | RPCI-98 05.G.6 map 12F-13A strain y; cn bw sp, *** SEQUENCING | | | |
| | | | | | IN PROGRESS ***, 220 unordered pieces. | | | |
| | | GB_HTG6: AC008334 | 154566 | AC008334 | Drosophila melanogaster chromosome X clone BACR08K05 (D885) RPCI-98 | Drosophila melanogaster | 37,783 | 02-DEC-1999 |
| | | | | | 08.K.5 map 12F-12F strain y; cn bw sp, *** SEQUENCING | | | |
| | | | | | IN PROGRESS ***, 84 unordered pieces. | | | |
| rxa00908 | 681 | GB_GSS12: AQ409791 | 561 | AQ409791 | HS_5090_B2_B12_T7A RPCI-11 Human Male BAC Library | Homo sapiens | 39,711 | 17-MAR-1999 |
| | | | | | Homo sapiens genomic clone Plate = 666 Col = 24 Row = D, | | | |
| | | | | | genomic survey sequence. | | | |
| | | GB_GSS3: B83773 | 535 | B83773 | CpG0110A CpIOWAgDNA1 Cryptosporidium parvum genomic, | Cryptosporidium parvum | 44,615 | 06-MAY-1999 |
| | | | | | genomic survey sequence. | | | |
| | | GB_GSS12: AQ409791 | 561 | AQ409791 | HS_5090_B2_B12_T7A RPCI-11 Human Male BAC Library Homo sapiens | Homo sapiens | 41,333 | 17-MAR-1999 |
| | | | | | genomic clone Plate = 666 Col = 24 | | | |
| | | | | | Row = D, genomic survey sequence. | | | |
| rxa00915 | 753 | GB_HTG2: HS1118M15 | 190466 | AL109964 | Homo sapiens chromosome 20 clone RP5-1118M15, *** SEQUENCING | Homo sapiens | 40,027 | 30-Nov-99 |
| | | | | | IN PROGRESS ***, in unordered pieces. | | | |
| | | GB_HTG2: HS1057B20 | 204291 | AL109823 | Homo sapiens chromosome 20 clone RP5-1057B20 map q11.21-12, | Homo sapiens | 38,535 | 30-Nov-99 |
| | | | | | *** SEQUENCING IN PROGRESS ***, in unordered pieces. | | | |
| | | GB_HTG2: HS1118M15 | 190466 | AL109964 | Homo sapiens chromosome 20 clone RP5-1118M15, | Homo sapiens | 40,027 | 30-Nov-99 |
| | | | | | *** SEQUENCING IN PROGRESS ***, in unordered pieces. | | | |
| rxa00916 | 3714 | GB_EST28: AI543268 | 568 | AI543268 | SD09973.5prime SD Drosophila melanogaster Schneider L2 cell | Drosophila melanogaster | 40,426 | 22-MAR-1999 |
| | | | | | culture pOT2 Drosophila melanogaster cDNA clone | | | |
| | | | | | SD09973 5prime, mRNA sequence. | | | |
| | | GB_IN2: AC004301 | 68620 | AC004301 | Drosophila melanogaster DNA sequence (P1 DS07134 (D192)), complete sequence. | Drosophila melanogaster | 37,696 | 29-MAY-1998 |
| | | GB_EST37: AI994315 | 524 | AI994315 | 701502677 A. thaliana, Ohio State clone set Arabidopsis thaliana | Arabidopsis thaliana | 40,076 | 8-Sep-99 |
| | | | | | cDNA clone 701502677, mRNA sequence. | | | |
| rxa00917 | 2802 | GB_BA1: SYCSLRB | 146271 | D64000 | Synechocystis sp. PCC6803 complete genome, 19/27, 2392729-2538999. | Synechocystis sp. | 38,447 | 13-Feb-99 |
| | | GB_HTG1: CEY39E4_2 | 110000 | Z94158 | Caenorhabditis elegans chromosome III clone Y39E4, *** SEQUENCING | Caenorhabditis elegans | 38,218 | Z94158 |
| | | | | | IN PROGRESS ***, in unordered pieces. | | | |
| | | GB_HTG1: CEY39E4_2 | 110000 | Z94158 | Caenorhabditis elegans chromosome III clone Y39E4, *** SEQUENCING | Caenorhabditis elegans | 38,218 | Z94158 |
| | | | | | IN PROGRESS ***, in unordered pieces. | | | |
| rxa00921 | | | | | | | | |
| rxa00926 | 486 | GB_OM: SSU75316 | 5996 | U75316 | Sus scrofa beta-myosin heavy chain mRNA, complete cds. | Sus scrofa | 38,958 | 03-DEC-1996 |
| | | GB_EST21: AA970971 | 371 | AA970971 | op10b11.s1 NCI_CGAP_Kid6 Homo sapiens cDNA clone IMAGE: | Homo sapiens | 40,841 | 13-Apr-99 |
| | | | | | 1575261 3′, mRNA sequence. | | | |
| | | GB_OM: SSU75316 | 5996 | U75316 | Sus scrofa beta-myosin heavy chain mRNA, complete cds. | Sus scrofa | 38,578 | 03-DEC-1996 |
| rxa00930 | 876 | GB_BA1: MTCI270A | 1670 | Z98045 | Mycobacterium tuberculosis H37Rv complete genome; segment 116/162. | Mycobacterium | 37,927 | 17-Jun-98 |
| | | | | | | tuberculosis | | |
| | | GB_BA1: U00011 | 40429 | U00011 | Mycobacterium leprae cosmid B1177. | Mycobacterium leprae | 38,623 | 01-MAR-1994 |
| | | GB_RO: S58745 | 817 | S58745 | thyrotroph embryonic factor = leucine zipper transcription factor [rats, | Rattus sp. | 41,483 | 07-MAY-1993 |
| | | | | | pituitary, mRNA, 817 nt]. | | | |
| rxa00932 | 597 | GB_PR4: AC009509 | 192690 | AC009509 | Homo sapiens 12p11-37.2-54.4 BAC RP11-1060J15 (Roswell Park | Homo sapiens | 38,776 | 01-DEC-1999 |
| | | | | | Cancer Institute Human BAC Library) complete sequence. | | | |
| | | GB_PR3: AC004072 | 170658 | AC004072 | Human Chromosome X clone bWXD342, complete sequence. | Homo sapiens | 35,000 | 08-MAR-1998 |
| | | GB_PR4: AC004617 | 176552 | AC004617 | Homo sapiens chromosome Y, clone 264, M, 20, complete sequence. | Homo sapiens | 35,702 | 13-OCT-1999 |
| rxa00933 | 585 | GB PL1: MGNGAGPOLI | 5638 | L35053 | Transposon MAGGY gag and pol gene homologues, partial cds's. | Magnaporthe grisea | 40,283 | 4-Aug-94 |
| | | GB PL1: MGNGAGPOLI | 5638 | L35053 | Transposon MAGGY gag and pol gene homologues, partial cds's. | Magnaporthe grisea | 37,739 | 4-Aug-94 |
| rxa00940 | 519 | GB_PR2: HS179N16 | 172048 | Z95152 | Homo sapiens DNA sequence from PAC 179N16 on chromosome | Homo sapiens | 38,252 | 23-Nov-99 |
| | | | | | 6p21.1-21.33. Contains the SAPK4 (MAPK p38delta) gene, and the alternatively | | | |
| | | | | | spliced SAPK2 gene coding for CSaids binding | | | |
| | | | | | protein CSBP2 and a MAPK p38beta LIKE protein. | | | |
| | | | | | Contains ESTs, STSs and two predicted CpG | | | |
| | | | | | islands, complete sequence. | | | |
| | | GB_EST26: AU001018 | 304 | AU001018 | AU001018 Bombyx mori p50(Daizo) Bombyx mori cDNA | Bombyx mori | 45,745 | 15-Jan-99 |
| | | | | | clone fbf0932f, mRNA sequence. | | | |
| | | GB_EST26: AU001019 | 304 | AU001019 | AU001019 Bombyx mori p50(Daizo) Bombyx mori cDNA clone | Bombyx mori | 45,745 | 15-Jan-99 |
| | | | | | fbf0934f, mRNA sequence. | | | |
| rxa00943 | 1035 | GB_BA2: AF079317 | 184457 | AF079317 | Sphingomonas aromaticivorans plasmid pNL1, complete plasmid sequence. | Sphingomonas | 38,151 | 12-Jan-99 |
| | | | | | | aromaticivorans | | |
| | | GB_HTG3: AC008329 | 114408 | AC008329 | Drosophila melanogaster chromosome 2 clone BACR31D05 (D861) RPCI-98 | Drosophila melanogaster | 34,317 | 17-Aug-99 |
| | | | | | 31.D.5 map 28C-28D strain y; cn bw sp, *** SEQUENCING | | | |
| | | | | | IN PROGRESS ***, 105 unordered pieces. | | | |
| | | GB_HTG3: AC008329 | 114408 | AC008329 | Drosophila melanogaster chromosome 2 clone BACR31D05 (D861) RPCI-98 | Drosophila melanogaster | 34,317 | 17-Aug-99 |
| | | | | | 31.D.5 map 28C-28D strain y; cn bw sp, *** SEQUENCING | | | |
| | | | | | IN PROGRESS ***, 105 unordered pieces. | | | |
| rxa00946 | 897 | GB_BA1: MTV008 | 63033 | AL021246 | Mycobacterium tuberculosis H37Rv complete genome; segment 108/162. | Mycobacterium | 36,045 | 17-Jun-98 |
| | | | | | | tuberculosis | | |
| | | GB_GSS14: AQ571765 | 526 | AQ571765 | HS_2094_A2_B09_MR CIT Approved Human Genomic Sperm Library | Homo sapiens | 38,021 | 1-Jun-99 |
| | | | | | D Homo sapiens genomic clone Plate = 2094 Col = 18 | | | |
| | | | | | Row = C, genomic survey sequence. | | | |
| | | GB_RO: RRFE65G | 2464 | X60468 | R. rattus FE65 gene for adaptor protein interacting with the | Rattus rattus | 38,417 | 1-Feb-96 |
| | | | | | beta-amyloid precursor protein intracellular domain. | | | |
| rxa00949 | 771 | GB_VI: PPCCGAAA | 5366 | M26281 | Hamster papovavirus complete genome. | Hamster papovavirus | 36,579 | 22-MAY-1995 |
| | | GB_VI: HAPVXX | 5366 | X02449 | Hamster Papovavirus (HapV) genome. | Hamster papovavirus | 36,579 | 22-OCT-1999 |
| | | GB_BA2: AE000878 | 15432 | AE000878 | Methanobacterium thermoautotrophicum from bases 976801 to 992232 | Methanobacterium | 36,856 | 15-Nov-97 |
| | | | | | (section 84 of 148) of the complete genome. | thermoautotrophicum | | |
| rxa00959 | 579 | GB_BA1: CGMTRAR | 951 | X75083 | C. glutamicum mtrA gene locus with 5-methyltryptophan resistance. | Corynebacterium | 99,133 | 18-Aug-94 |
| | | | | | | glutamicum | | |
| | | GB_BA1: CGMTRA | 587 | X75084 | C. glutamicum sequence corresponding to mtrA locus. | Corynebacterium | 99,216 | 18-Aug-94 |
| | | | | | | glutamicum | | |
| | | GB_BA1: BLTRP | 7725 | X04960 | Brevibacterium lactofermentum tryptophan operon. | Corynebacterium | 96,800 | 10-Feb-99 |
| | | | | | | glutamicum | | |
| rxa00963 | 960 | GB_EST15: AA484511 | 504 | AA484511 | nf08f07.s1 NCI_CGAP_Li1 Homo sapiens cDNA clone IMAGE: 913189 | Homo sapiens | 43,750 | 18-Aug-97 |
| | | | | | similar to gb: Y00764 UBIQUINOL-CYTOCHROME C REDUCTASE | | | |
| | | | | | 11 KD PROTEIN (HUMAN);, mRNA sequence. | | | |
| | | GB_EST20: AA894481 | 544 | AA894481 | nw76b10.s1 NCI_CGAP_Pr12 Homo sapiens cDNA clone IMAGE: 1252507 | Homo sapiens | 37,500 | 6-Apr-98 |
| | | | | | similar to gb: Y00764 UBIQUINOL-CYTOCHROME C REDUCTASE 11 KD | | | |
| | | | | | PROTEIN (HUMAN);, mRNA sequence. | | | |
| | | GB_EST15: AA526497 | 582 | AA526497 | ni96d07.s1 NCI_CGAP_Pr21 Homo sapiens cDNA clone IMAGE: 984685 | Homo sapiens | 38,554 | 5-Aug-97 |
| | | | | | 3′ similar to gb: Y00764 UBIQUINOL-CYTOCHROME C REDUCTASE 11 KD | | | |
| | | | | | PROTEIN (HUMAN);, mRNA sequence. | | | |
| rxa00969 | 1458 | GB_BA1: CGHOMTHR | 3685 | Y00546 | Corynebacterium glutamicum hom-thrB genes for homoserine | Corynebacterium | 99,588 | 12-Sep-93 |
| | | | | | dehydrogenase and homoserine kinase. | glutamicum | | |
| | | GB_PAT: I09077 | 3685 | I09077 | Sequence 1 from Patent WO 8809819. | Unknown. | 99,246 | 02-DEC-1994 |
| | | GB_BA1: BLTHRA | 1483 | Y00476 | B. lactofermentum thr A gene. | Corynebacterium | 99,378 | 05-MAY-1993 |
| | | | | | | glutamicum | | |
| rxa00971 | 341 | GB_BA1: CGHOMTHR | 3685 | Y00546 | Corynebacterium glutamicum hom-thrB genes for homoserine | Corynebacterium | 35,435 | 12-Sep-93 |
| | | | | | dehydrogenase and homoserine kinase. | glutamicum | | |
| | | GB_PAT: I09077 | 3685 | I09077 | Sequence 1 from Patent WO 8809819. | Unknown. | 35,435 | 02-DEC-1994 |
| | | GB_BA1: BLTHRB | 1139 | Y00140 | Brevibacterium lactofermentum thrB gene for homoserine kinase. | Corynebacterium | 40,964 | 12-Sep-93 |
| | | | | | | glutamicum | | |
| rxa00973 | 726 | GB_BA1: CGHOMTHR | 3685 | Y00546 | Corynebacterium glutamicum hom-thrB genes for homoserine | Corynebacterium | 41,797 | 12-Sep-93 |
| | | | | | dehydrogenase and homoserine kinase. | glutamicum | | |
| | | GB_PAT: I09077 | 3685 | I09077 | Sequence 1 from Patent WO 8809819. | Unknown. | 41,797 | 02-DEC-1994 |
| | | GB_IN2: AC006574 | 127035 | AC006574 | Drosophila melanogaster, chromosome 2R, region 39A3-39B1, | Drosophila melanogaster | 37,355 | 16-Feb-99 |
| | | | | | P1 clones DS02919 and DS05130, complete sequence. | | | |
| rxa00978 | 738 | GB_PR2: HSAC000372 | 41730 | AC000372 | Human cosmid g1980a186, complete sequence. | Homo sapiens | 34,674 | 12-MAR-1997 |
| | | GB_PR3: AC005503 | 40998 | AC005503 | Homo sapiens clone UWGC: g5129s003 from 7q31, complete sequence. | Homo sapiens | 34,674 | 20-Aug-98 |
| | | GB_PR2: HSAC000372 | 41730 | AC000372 | Human cosmid g1980a186, complete sequence. | Homo sapiens | 38,881 | 12-MAR-1997 |
| rxa00986 | 465 | GB_GSS10: AQ258013 | 761 | AQ258013 | nbxb0019H05f CUGI Rice BAC Library Oryza sativa genomic clone | Oryza sativa | 31,533 | 23-OCT-1998 |
| | | | | | nbxb0019H05f, genomic survey sequence. | | | |
| | | GB_PR3: HS83L6 | 61187 | Z99130 | Human DNA sequence from PAC 83L6 on chromosome Xp11.1-11.22. | Homo sapiens | 38,395 | 23-Nov-99 |
| | | | | | Contains ZXDA (ZFPA) zinc finger gene, ESTs and STSs, complete sequence. | | | |
| | | GB_PR3: HS598A24 | 96558 | AL031115 | Human DNA sequence from clone 598A24 on chromosome Xp11.1-11.23 | Homo sapiens | 37,333 | 23-Nov-99 |
| | | | | | Contains zinc finger X-linked proteins ZXDA, ZXDB, ESTs | | | |
| | | | | | and STS, complete sequence. | | | |
| rxa00987 | 588 | GB_HTG1: HS24A17 | 2000 | AL035452 | Homo sapiens chromosome X clone RP6-24A17, | Homo sapiens | 38,821 | 23-Nov-99 |
| | | | | | *** SEQUENCING IN PROGRESS ***, in unordered pieces. | | | |
| | | GB_HTG1: HS24A17 | 2000 | AL035452 | Homo sapiens chromosome X clone RP6-24A17, | Homo sapiens | 38,821 | 23-Nov-99 |
| | | | | | *** SEQUENCING IN PROGRESS ***, in unordered pieces. | | | |
| | | GB_PR2: HS1156N12 | 146360 | AL009047 | Human DNA sequence from clone 1156N12 on chromosome X. | Homo sapiens | 38,821 | 23-Nov-99 |
| | | | | | Contains an STS and GSSs, complete sequence. | | | |
| rxa00988 | 546 | GB_IN1: CELZC328 | 30350 | AF000194 | Caenorhabditis elegans cosmid ZC328. | Caenorhabditis elegans | 36,122 | 23-Apr-97 |
| | | GB_IN1: CELZC328 | 30350 | AF000194 | Caenorhabditis elegans cosmid ZC328. | Caenorhabditis elegans | 37,959 | 23-Apr-97 |
| rxa01005 | 969 | GB_BA1: FVBPOAD2A | 45519 | D26094 | Flavobacterium sp. plasmid pOAD2 DNA, whole sequence. | Flavobacterium sp. | 37,998 | 6-Feb-99 |
| | | GB_GSS1: CNS00UGV | 472 | AL090973 | Arabidopsis thaliana genome survey sequence SP6 end of BAC T6P9 | Arabidopsis thaliana | 39,024 | 28-Jun-99 |
| | | | | | of TAMU library from strain Columbia of Arabidopsis thaliana, | | | |
| | | | | | genomic survey sequence. | | | |
| | | GB_GSS1: CNS00S69 | 512 | AL087999 | Arabidopsis thaliana genome survey sequence SP6 end of BAC T1C4 of TAMU | Arabidopsis thaliana | 35,938 | 28-Jun-99 |
| | | | | | library from strain Columbia of Arabidopsis thaliana, genomic survey sequence. | | | |
| rxa01007 | | | | | | | | |
| rxa01008 | | | | | | | | |
| rxa01011 | 1356 | GB_EST38: AW039107 | 598 | AW039107 | EST281080 tomato mixed elicitor, BTI Lycopersicon | Lycopersicon esculentum | 39,724 | 18-OCT-1999 |
| | | | | | esculentum cDNA clone cLET12F19, mRNA sequence. | | | |
| | | GB_BA1: MTY13E12 | 43401 | Z95390 | Mycobacterium tuberculosis H37Rv complete genome; segment 147/162. | Mycobacterium | 38,618 | 17-Jun-98 |
| | | | | | | tuberculosis | | |
| | | GB_BA1: MBU15140 | 2136 | U15140 | Mycobacterium bovis ribosomal proteins IF-1 (infA), L36 (rpmJ), S13 (rpsM) | Mycobacterium bovis | 37,070 | 28-OCT-1996 |
| | | | | | and S11 (rpsK) genes, complete cds, and S4 (rpsD) gene, partial cds. | | | |
| rxa01016 | 771 | GB_BA1: CGBPHI16 | 962 | Y12472 | C. glutamicum DNA, attachment site bacteriophage Phi-16. | Corynebacterium | 45,098 | 05-MAR-1999 |
| | | | | | | glutamicum | | |
| | | GB_BA1: CGBPHI16 | 962 | Y12472 | C. glutamicum DNA, attachment site bacteriophage Phi-16. | Corynebacterium | 37,251 | 05-MAR-1999 |
| | | | | | | glutamicum | | |
| rxa01017 | 732 | GB_BA1: CGBPHI16 | 962 | Y12472 | C. glutamicum DNA, attachment site bacteriophage Phi-16. | Corynebacterium | 39,245 | 05-MAR-1999 |
| | | | | | | glutamicum | | |
| | | GB_BA2: AF099014 | 2500 | AF099014 | Streptomyces coelicolor strain A3(2) transposase (tnpA) and | Streptomyces coelicolor | 38,036 | 1-Jun-99 |
| | | | | | Fe-containing superoxide dismutase I (sodF1) genes, complete cds. | | | |
| | | GB_HTG3: AC009249 | 119461 | AC009249 | Drosophila melanogaster chromosome 3 clone BACR02M06 | Drosophila melanogaster | 37,853 | 27-Aug-99 |
| | | | | | (D1003) RPCI-98 02.M.6 map 98B-98B strain y; cn bw sp, | | | |
| | | | | | *** SEQUENCING IN PROGRESS ***, 97 unordered pieces. | | | |
| rxa01021 | 622 | GB_BA2: U39718 | 8603 | U39718 | Mycoplasma genitalium section 40 of 51 of the complete genome. | Mycoplasma genitalium | 39,348 | 5-Nov-98 |
| | | GB_GSS3: B46221 | 457 | B46221 | HS-1063-A2-D06-MR.abi CIT Human Genomic Sperm | Homo sapiens | 39,933 | 21-OCT-1997 |
| | | | | | Library C Homo sapiens genomic clone Plate = CT 796 Col = 12 Row = G, | | | |
| | | | | | genomic survey sequence. | | | |
| | | GB_OV: AF035529 | 848 | AF035529 | Xenopus laevis Smad6 mRNA, partial cds. | Xenopus laevis | 37,203 | 1-Jan-98 |
| rxa01023 | 1101 | GB_HTG2: HSJ435K13 | 151301 | AL109941 | Homo sapiens chromosome 6 clone | Homo sapiens | 34,405 | 03-DEC-1999 |
| | | | | | RP3-435K13 map q14.1-16.1, *** SEQUENCING IN PROGRESS ***, | | | |
| | | | | | in unordered pieces. | | | |
| | | GB_HTG2: HSJ435K13 | 151301 | AL109941 | Homo sapiens chromosome 6 clone RP3-435K13 | Homo sapiens | 34,405 | 03-DEC-1999 |
| | | | | | map q14.1-16.1, *** SEQUENCING IN PROGRESS ***, in unordered pieces. | | | |
| | | GB_BA1: RCU57682 | 86896 | U57682 | Rhodobacter capsulatus cosmids 143-147, complete sequence. | Rhodobacter capsulatus | 39,022 | 7-Feb-97 |
| rxa01028 | 2172 | GB_IN1: CBU55260 | 2518 | U55260 | Caenorhabditis briggsae beta tubulin (mec-7) gene, complete cds. | Caenorhabditis briggsae | 39,467 | 5-Jun-96 |
| | | GB_HTG1: CEY1A5 | 196643 | AL008872 | Caenorhabditis elegans chromosome III | Caenorhabditis elegans | 38,168 | 9-Nov-97 |
| | | | | | clone Y1A5, *** SEQUENCING IN PROGRESS ***, in unordered pieces. | | | |
| | | GB_HTG1: CEY1A5 | 196643 | AL008872 | Caenorhabditis elegans chromosome III | Caenorhabditis elegans | 38,168 | 9-Nov-97 |
| | | | | | clone Y1A5, *** SEQUENCING IN PROGRESS ***, in unordered pieces. | | | |
| rxa01029 | 612 | GB_PR3: HS466P17 | 149963 | AL023806 | Human DNA sequence from clone 466P17 on chromosome 6q24. Contains a | Homo sapiens | 38,330 | 23-Nov-99 |
| | | | | | putative novel gene, the 5′ part of the EPM2A (Laforin) gene, ESTs, | | | |
| | | | | | STSs, GSSs, genomic marker D6S1703 and D6S1443, a putative | | | |
| | | | | | CpG island and a ca repeat polymorphism, complete sequence. | | | |
| | | GB_PR3: HS466P17 | 149963 | AL023806 | Human DNA sequence from clone 466P17 on chromosome 6q24. Contains | Homo sapiens | 39,262 | 23-Nov-99 |
| | | | | | a putative novel gene, the 5′ part of the EPM2A (Laforin) gene, ESTs. | | | |
| | | | | | STSs, GSSs, genomic marker D6S1703 and D6S1443, a putative CpG island | | | |
| | | | | | and a ca repeat polymorphism, complete sequence. | | | |
| | | GB_RO: D78344 | 59641 | D78344 | Mouse DNA for Ig gamma-chains, partial cds. | Mus musculus | 35,472 | 5-Feb-99 |
| rxa01031 | 789 | GB_PR4: AC006948 | 168558 | AC006948 | Homo sapiens chromosome 17, clone hRPK.334_M_10, complete sequence. | Homo sapiens | 44,005 | 27-Apr-99 |
| | | GB_PL2: AC011665 | 101845 | AC011665 | Arabidopsis thaliana chromosome I BAC T6L1 genomic sequence, complete sequence. | Arabidopsis thaliana | 38,170 | 11-Nov-99 |
| | | GB_RO: MMU19724 | 5523 | U19724 | Mus musculus MMTV integration locus, aromatase gene, 3′UTR. | Mus musculus | 35,256 | 17-Feb-96 |
| rxa01032 | 498 | GB_EST9: AA118349 | 576 | AA118349 | ml56b06.r1 Stratagene mouse testis (#937308) Mus musculus | Mus musculus | 43,056 | 19-Nov-96 |
| | | | | | cDNA clone IMAGE: 515987 5′ similar to gb: L04852 | | | |
| | | | | | Mouse (MOUSE);, mRNA sequence. | | | |
| | | GB_EST9: AA118349 | 576 | AA118349 | ml56b06.r1 Stratagene mouse testis (#937308) Mus musculus | Mus musculus | 42,273 | 19-Nov-96 |
| | | | | | cDNA clone IMAGE: 515987 5′ similar to gb: L04852 | | | |
| | | | | | Mouse (MOUSE);, mRNA sequence. | | | |
| rxa01033 | 459 | GB_GSS13: AQ434868 | 520 | AQ434868 | HS_5117_B1_D07_SP6E RPCI-11 Human Male BAC | Homo sapiens | 38,608 | 31-MAR-1999 |
| | | | | | Library Homo sapiens genomic clone Plate = 693 | | | |
| | | | | | Col = 13 Row = H, genomic survey sequence. | | | |
| | | GB_HTG2: HSDJ794I6 | 137124 | AL109976 | Homo sapiens chromosome 20 clone RP4-794I6, | Homo sapiens | 28,929 | 27-Nov-99 |
| | | | | | *** SEQUENCING IN PROGRESS ***, in unordered pieces. | | | |
| | | GB_HTG2: HSDJ794I6 | 137124 | AL109976 | Homo sapiens chromosome 20 clone RP4-794I6, | Homo sapiens | 28,929 | 27-Nov-99 |
| | | | | | *** SEQUENCING IN PROGRESS ***, in unordered pieces. | | | |
| rxa01034 | 477 | GB_PL2: ATT29H11 | 87011 | AL049659 | Arabidopsis thaliana DNA chromosome 3, BAC clone T29H11. | Arabidopsis thaliana | 32,495 | 9-Jun-99 |
| | | GB_PL2: ATT29H11 | 87011 | AL049659 | Arabidopsis thaliana DNA chromosome 3, BAC clone T29H11. | Arabidopsis thaliana | 40,042 | 9-Jun-99 |
| | | GB_EST25: AU045739 | 436 | AU045739 | AU045739 Mouse sixteen-cell-embryo cDNA Mus musculus | Mus musculus | 35,435 | 09-DEC-1998 |
| | | | | | cDNA clone J0940F02 3′, mRNA sequence. | | | |
| rxa01035 | 729 | GB_GSS1: CNS00QD8 | 526 | AL085658 | Arabidopsis thaliana genome survey sequence SP6 end of | Arabidopsis thaliana | 36,466 | 28-Jun-99 |
| | | | | | BAC F11C22 of IGF library from strain Columbia of Arabidopsis | | | |
| | | | | | thaliana, genomic survey sequence. | | | |
| | | GB_GSS13: AQ447948 | 515 | AQ447948 | mgxb0015A01r CUGI Rice Blast BAC Library | Magnaporthe grisea | 45,833 | 8-Apr-99 |
| | | | | | Magnaporthe grisea genomic clone mgxb0015A01r, genomic survey sequence. | | | |
| | | GB_GSS1: CNS00QD8 | 526 | AL085658 | Arabidopsis thaliana genome survey sequence SP6 end | Arabidopsis thaliana | 37,500 | 28-Jun-99 |
| | | | | | of BAC F11C22 of IGF library from strain Columbia of | | | |
| | | | | | Arabidopsis thaliana, genomic survey sequence. | | | |
| rxa01036 | 576 | GB_HTG2: AC004846 | 143577 | AC004846 | Homo sapiens clone DJ0647C14, | Homo sapiens | 38,137 | 12-Jun-98 |
| | | | | | *** SEQUENCING IN PROGRESS ***, 21 unordered pieces. | | | |
| | | GB_EST19: AA804532 | 427 | AA804532 | ns28c05.s1 NCI_CGAP_GCB1 Homo sapiens cDNA clone | Homo sapiens | 33,582 | 18-Feb-98 |
| | | | | | IMAGE: 1184936 3′ similar to contains element MER40 | | | |
| | | | | | repetitive element;, mRNA sequence. | | | |
| | | GB_HTG2: AC006342 | 201618 | AC006342 | Homo sapiens clone DJ0054D12, | Homo sapiens | 38,137 | 11-Jan-99 |
| | | | | | *** SEQUENCING IN PROGRESS ***, 3 unordered pieces. | | | |
| rxa01037 | 651 | GB_PR4: AC004812 | 138532 | AC004812 | Homo sapiens PAC clone 267D11 from 12, complete sequence. | Homo sapiens | 39,750 | 05-DEC-1998 |
| | | GB_HTG2: AC006342 | 201618 | AC006342 | Homo sapiens clone DJ0054D12, *** SEQUENCING | Homo sapiens | 41,214 | 11-Jan-99 |
| | | | | | IN PROGRESS ***, 3 unordered pieces. | | | |
| | | GB_HTG2: AC004846 | 143577 | AC004846 | Homo sapiens clone DJ0647C14, *** SEQUENCING | Homo sapiens | 41,214 | 12-Jun-98 |
| | | | | | IN PROGRESS ***, 21 unordered pieces. | | | |
| rxa01038 | | | | | | | | |
| rxa01039 | 699 | GB_PR4: HUAC004682 | 189134 | AC004682 | Homo sapiens Chromosome 16 BAC clone CIT987SK-A-259H10, complete sequence. | Homo sapiens | 36,192 | 23-Nov-99 |
| | | GB_HTG2: HS500L14 | 164856 | AL023583 | Homo sapiens chromosome 6 clone RP3-500L14 | Homo sapiens | 34,632 | 30-Nov-99 |
| | | | | | map p23-24.3, *** SEQUENCING IN PROGRESS ***, in unordered pieces. | | | |
| | | GB_HTG2: HS500L14 | 164856 | AL023583 | Homo sapiens chromosome 6 clone RP3-500L14 | Homo sapiens | 34,632 | 30-Nov-99 |
| | | | | | map p23-24.3, *** SEQUENCING IN PROGRESS ***, in unordered pieces. | | | |
| rxa01040 | 1026 | GB_EST24: AI193549 | 479 | AI193549 | qe70e06.x1 Soares_fetal_lung_NbHL19W | Homo sapiens | 40,126 | 29-OCT-1998 |
| | | | | | Homo sapiens cDNA clone IMAGE: 1744354 3′, mRNA sequence. | | | |
| | | GB_PR2: HSU38545 | 3609 | U38545 | Human ARF-activated phosphatidylcholine-specific | Homo sapiens | 38,652 | 10-MAR-1997 |
| | | | | | phospholipase D1a (hPLD1) mRNA, complete cds. | | | |
| | | GB_PR2: AC002481 | 28244 | AC002481 | Human cosmid clone LUCA12 from 3p21.3, complete sequence. | Homo sapiens | 39,643 | 21-Aug-97 |
| rxa01041 | 276 | GB_HTG6: AC007957 | 212658 | AC007957 | Homo sapiens, *** SEQUENCING IN PROGRESS ***, 2 ordered pieces. | Homo sapiens | 40,809 | 26-Nov-99 |
| | | GB_PR2: AP000552 | 157086 | AP000552 | Homo sapiens genomic DNA, chromosome 22q11.2, | Homo sapiens | 40,809 | 01-OCT-1999 |
| | | | | | BCRL2 region, clone: KB1183D5. | | | |
| | | GB_PR3: HS57A13 | 169693 | Z83848 | Human DNA sequence from PAC 57A13 between markers | Homo sapiens | 37,647 | 23-Nov-99 |
| | | | | | DXS6791 and DXS8038 on chromosome X contains glutamate receptor | | | |
| | | | | | subunit GluRC, ESTs, STS and polymorphic CA repeat. | | | |
| rxa01042 | 1401 | GB_BA1: MTCY10G2 | 38970 | Z92539 | Mycobacterium tuberculosis H37Rv complete genome; segment 47/162. | Mycobacterium | 36,023 | 17-Jun-98 |
| | | | | | | tuberculosis | | |
| | | GB_BA1: MTCY10G2 | 38970 | Z92539 | Mycobacterium tuberculosis H37Rv complete genome; segment 47/162. | Mycobacterium | 37,010 | 17-Jun-98 |
| | | | | | | tuberculosis | | |
| | | GB_EST29: AI551042 | 538 | AI551042 | vx33d11.x1 Stratagene mouse lung 937302 Mus musculus | Mus musculus | 38,806 | 23-MAR-1999 |
| | | | | | cDNA clone IMAGE: 1277013 3′, mRNA sequence. | | | |
| rxa01043 | 696 | GB_BA1: AF006658 | 2500 | AF006658 | Bacteroides fragilis beta-glucosidase gene, complete cds. | Bacteroides fragilis | 39,156 | 12-Jul-97 |
| | | GB_BA1: MLB1790G | 37617 | Z14314 | M. leprae genes rplL, rpoB, rpoC, end, rpsL, rpsG, efg, tuf, rpsJ, rplC for | Mycobacterium leprae | 39,970 | 11-Feb-93 |
| | | | | | ribosomal protein L7, RNA polymerase beta subunit, RNA polymerase beta' subunit, | | | |
| | | | | | endonuclease, ribosomal protein S7, ribosomal protein S12, elongation factor G, | | | |
| | | | | | elongation factor Tu, ribosomal protein S10, ribosomal | | | |
| | | | | | protein L3 and mkl gene. | | | |
| | | GB_BA1: AF006658 | 2500 | AF006658 | Bacteroides fragilis beta-glucosidase gene, complete cds. | Bacteroides fragilis | 36,472 | 12-Jul-97 |
| rxa01044 | 1380 | GB_HTG6: AC010998 | 144338 | AC010998 | Homo sapiens clone RP11-95I16, *** SEQUENCING | Homo sapiens | 37,630 | 08-DEC-1999 |
| | | | | | IN PROGRESS ***, 17 unordered pieces. | | | |
| | | GB_HTG6: AC010998 | 144338 | AC010998 | Homo sapiens clone RP11-95I16, *** SEQUENCING | Homo sapiens | 37,864 | 08-DEC-1999 |
| | | | | | IN PROGRESS ***, 17 unordered pieces. | | | |
| | | GB_BA2: AE000939 | 10599 | AE000939 | Methanobacterium thermoautotrophicum from bases 1698671 to 1709269 (section 145 | Methanobacterium | 34,480 | 15-Nov-97 |
| | | | | | of 148) of the complete genome. | thermoautotrophicum | | |
| rxa01045 | 1947 | GB_VI: FCVF6A | 8440 | M18247 | Feline leukemia virus, subgroup A (FeLV-FAIDS), complete nucleotide sequence. | Feline leukemia virus | 37,617 | 29-MAR-1996 |
| | | GB_OM: CATFLVPOL | 3639 | L06140 | Felis catus endogenous FeLV proviral polyprotein | Felis catus | 41,966 | 21-Aug-95 |
| | | | | | (protease (PRO), reverse transcriptase (RT), integrase/endonuclease (INT)) and | | | |
| | | | | | pol pseudogene, 3′ end. | | | |
| | | GB_VI: CEAVCG | 9189 | M33677 | Caprine arthritis encephalitis virus, complete proviral genome. | Caprine arthritis- | 36,297 | 04-MAR-1996 |
| | | | | | | encephalitis virus | | |
| rxa01046 | 1902 | GB_HTG3: AC008423 | 177734 | AC008423 | Homo sapiens chromosome 5 clone CIT-HSPC_298N6, | Homo sapiens | 38,720 | 3-Aug-99 |
| | | | | | *** SEQUENCING IN PROGRESS ***, 56 unordered pieces. | | | |
| | | GB_HTG3: AC008423 | 177734 | AC008423 | Homo sapiens chromosome 5 clone CIT-HSPC_298N6, | Homo sapiens | 38,720 | 3-Aug-99 |
| | | | | | *** SEQUENCING IN PROGRESS ***, 56 unordered pieces. | | | |
| | | GB_HTG3: AC008423 | 177734 | AC008423 | Homo sapiens chromosome 5 clone CIT-HSPC_298N6, | Homo sapiens | 35,882 | 3-Aug-99 |
| | | | | | *** SEQUENCING IN PROGRESS ***, 56 unordered pieces. | | | |
| rxa01047 | 597 | GB_EST20: AA842685 | 510 | AA842685 | MBAFCZ9C11T3 Brugia malayi adult female cDNA | Brugia malayi | 37,965 | 02-MAR-1998 |
| | | | | | (SAW96MLW-BmAF) Brugia malayi cDNA clone AFCZ9C11 5′, mRNA sequence. | | | |
| | | GB_EST20: AA842685 | 510 | AA842685 | MBAFCZ9C11T3 Brugia malayi adult female cDNA | Brugia malayi | 41,697 | 02-MAR-1998 |
| | | | | | (SAW96MLW-BmAF) Brugia malayi cDNA clone AFCZ9C11 5′, mRNA sequence. | | | |
| rxa01058 | 444 | GB_GSS9: AQ160800 | 745 | AQ160800 | nbxb0006C07r CUGI Rice BAC Library Oryza sativa | Oryza sativa | 38,242 | 12-Sep-98 |
| | | | | | genomic clone nbxb0006C07r, genomic survey sequence. | | | |
| | | GB_GSS3: B10162 | 1102 | B10162 | F11B10-Sp6 IGF Arabidopsis thaliana genomic | Arabidopsis thaliana | 42,263 | 14-MAY-1997 |
| | | | | | clone F11B10, genomic survey sequence. | | | |
| | | GB_BA1: AB032799 | 9077 | AB032799 | Chromobacterium violaceum violacein biosynthetic gene cluster (vioA, | Chromobacterium | 34,475 | 02-OCT-1999 |
| | | | | | vio B, vio C, vio D), complete cds. | violaceum | | |
| rxa01063 | 453 | GB_GSS4: AQ707752 | 510 | AQ707752 | HS_5560_A2_G07_T7A RPCI-11 Human Male | Homo sapiens | 36,932 | 7-Jul-99 |
| | | | | | BAC Library Homo sapiens genomic clone Plate = 1136 Col = 14 | | | |
| | | | | | Row = M, genomic survey sequence. | | | |
| | | GB_GSS4: AQ707752 | 510 | AQ707752 | HS_5560_A2_G07_T7A RPCI-11 Human Male | Homo sapiens | 35,885 | 7-Jul-99 |
| | | | | | BAC Library Homo sapiens genomic clone Plate = 1136 Col = 14 | | | |
| | | | | | Row = M, genomic survey sequence. | | | |
| rxa01066 | 849 | GB_BA2: U32709 | 10010 | U32709 | Haemophilus influenzae Rd section 24 of 163 of the complete genome. | Haemophilus influenzae Rd | 36,158 | 29-MAY-1998 |
| | | GB_RO: AB009615 | 1515 | AB009615 | Mus musculus mRNA for type II phosphatidylinositolphosphate | Mus musculus | 37,861 | 13-Feb-99 |
| | | | | | kinase-alpha, complete cds. | | | |
| | | GB_RO: AB032899 | 1914 | AB032899 | Rattus norvegicus PIPK2 alpha mRNA for phosphatidylinositol | Rattus norvegicus | 38,480 | 07-OCT-1999 |
| | | | | | 5-phosphate 4-kinase alpha, complete cds. | | | |
| rxa01068 | 1194 | GB_HTG4: AC006091 | 176878 | AC006091 | Drosophila melanogaster chromosome 3 clone BACR48G05 | Drosophila melanogaster | 35,539 | 27-OCT-1999 |
| | | | | | (D475) RPCI-98 48.G.5 map 91F1-91F13 strain y; cn bw sp, | | | |
| | | | | | *** SEQUENCING IN PROGRESS ***, 4 unordered pieces. | | | |
| | | GB_HTG4: AC006091 | 176878 | AC006091 | Drosophila melanogaster chromosome 3 clone BACR48G05 (D475) | Drosophila melanogaster | 35,539 | 27-OCT-1999 |
| | | | | | RPCI-98 48.G.5 map 91F1-91F13 strain y; cn bw sp, *** SEQUENCING | | | |
| | | | | | IN PROGRESS ***, 4 unordered pieces. | | | |
| | | GB_HTG2: AC008141 | 100729 | AC008141 | Drosophila melanogaster chromosome 3 clone BACR17F04 (D988) | Drosophila melanogaster | 34,415 | 2-Aug-99 |
| | | | | | RPCI-98 17.F.4 map 91F-91F strain y; cn bw sp, *** SEQUENCING IN | | | |
| | | | | | PROGRESS ***, 69 unordered pieces. | | | |
| rxa01069 | 837 | GB_EST15: AA531901 | 524 | AA531901 | TgESTzz32g09.r1 TgME49 invivo Bradyzoite cDNA size selected | Toxoplasma gondii | 43,005 | 22-Jul-97 |
| | | | | | Toxoplasma gondii cDNA clone tgzz32g09.r1 5′, mRNA sequence. | | | |
| | | GB_EST15: AA520183 | 527 | AA520183 | TgESTzz39d01.s1 TgME49 invivo Bradyzoite cDNA size | Toxoplasma gondii | 40,664 | 16-Jul-97 |
| | | | | | selected Toxoplasma gondii cDNA clone tgzz39d01.s1 3′, mRNA sequence. | | | |
| | | GB_HTG6: AC010846 | 187611 | AC010846 | Drosophila melanogaster chromosome X clone BACR13G13 | Drosophila melanogaster | 36,679 | 03-DEC-1999 |
| | | | | | (D894) RPCI-98 13.G.13 map 14B-14C strain y; cn bw sp, *** SEQUENCING IN | | | |
| | | | | | PROGRESS ***, 97 unordered pieces. | | | |
| rxa01071 | 2187 | GB_EST20: AA880319 | 450 | AA880319 | vx39h01.r1 Stratagene mouse lung 937302 Mus musculus | Mus musculus | 40,724 | 26-MAR-1998 |
| | | | | | cDNA clone IMAGE: 1277617 5′, mRNA sequence. | | | |
| | | GB_GSS14: AQ558382 | 435 | AQ558382 | HS_2068_B1_F06_T7C CIT Approved Human Genomic Sperm | Homo sapiens | 36,882 | 29-MAY-1999 |
| | | | | | Library D Homo sapiens genomic clone Plate = 2068 Col = 11 Row = L, | | | |
| | | | | | genomic survey sequence. | | | |
| | | GB_GSS15: AQ600385 | 483 | AQ600385 | HS_5357_B2_C05_SP6E RPCI-11 Human Male BAC | Homo sapiens | 40,476 | 10-Jun-99 |
| | | | | | Library Homo sapiens genomic clone Plate = 933 | | | |
| | | | | | Col = 10 Row = F, genomic survey sequence. | | | |
| rxa01074 | 828 | GB_BA1: PSEHEDDH | 3060 | M74256 | Pseudomonas aeruginosa 6-phosphogluconate dehydratase | Pseudomonas aeruginosa | 39,657 | 30-Nov-93 |
| | | | | | (edd) gene, and glyceraldehyde-3-phosphate dehydrogenase | | | |
| | | | | | (gap) gene, complete cds. | | | |
| | | GB_BA1: CGL007732 | 4460 | AJ007732 | Corynebacterium glutamicum 3′ ppc gene, secG gene, amt | Corynebacterium | 39,168 | 7-Jan-99 |
| | | | | | gene, ocd gene and 5′ soxA gene. | glutamicum | | |
| | | GB_EST9: AA066016 | 406 | AA066016 | ml52f12.r1 Stratagene mouse testis (#937308) Mus musculus | Mus musculus | 43,382 | 3-Feb-97 |
| | | | | | cDNA clone IMAGE: 515663 5′, mRNA sequence. | | | |
| rxa01075 | 534 | GB_EST21: AA986543 | 445 | AA986543 | ue14f08.x1 Sugano mouse embryo mewa Mus musculus | Mus musculus | 31,236 | 28-MAY-1998 |
| | | | | | cDNA clone IMAGE: 1480359 3′, mRNA sequence. | | | |
| | | GB_EST22: AI035794 | 509 | AI035794 | ue17d01.y1 Sugano mouse embryo mewa Mus musculus | Mus musculus | 42,264 | 26-Jun-98 |
| | | | | | cDNA clone IMAGE: 1480609 5′, mRNA sequence. | | | |
| | | GB_EST22: AI006506 | 384 | AI006506 | ue14f08.y1 Sugano mouse embryo mewa Mus musculus | Mus musculus | 46,637 | 12-Jun-98 |
| | | | | | cDNA clone IMAGE: 1480359 5′, mRNA sequence. | | | |
| rxa01076 | 1143 | GB_HTG2: AC007741 | 162450 | AC007741 | Homo sapiens clone NH0340F16, *** SEQUENCING IN | Homo sapiens | 38,209 | 5-Jun-99 |
| | | | | | PROGRESS ***, 3 unordered pieces. | | | |
| | | GB_HTG2: AC007741 | 162450 | AC007741 | Homo sapiens clone NH0340F16, *** SEQUENCING | Homo sapiens | 38,209 | 5-Jun-99 |
| | | | | | IN PROGRESS ***, 3 unordered pieces. | | | |
| | | GB_EST33: AV072325 | 317 | AV072325 | AV072325 Mus musculus stomach C57BL/6J adult | Mus musculus | 48,485 | 24-Jun-99 |
| | | | | | Mus musculus cDNA clone 2200003E03, mRNA sequence. | | | |
| rxa01078 | 957 | GB_BA2: RCPHSYNG | 45959 | Z11165 | R. capsulatus complete photosynthesis gene cluster. | Rhodobacter capsulatus | 36,603 | 2-Sep-99 |
| | | GB_BA2: RCPHSYNG | 45959 | Z11165 | R. capsulatus complete photosynthesis gene cluster. | Rhodobacter capsulatus | 37,989 | 2-Sep-99 |
| | | GB_PR4: AF073931 | 7898 | AF073931 | Homo sapiens low-voltage activated calcium channel alpha 1H mRNA, complete cds. | Homo sapiens | 37,953 | 04-MAR-1999 |
| rxa01083 | 399 | GB_BA2: AF112535 | 4363 | AF112535 | Corynebacterium glutamicum putative glutaredoxin NrdH | Corynebacterium | 99,499 | 5-Aug-99 |
| | | | | | (nrdH), Nrdl (nrdl), and ribonucleotide reductase | glutamicum | | |
| | | | | | alpha-chain (nrdE) genes, complete cds. | | | |
| | | GB_PR3: HSH3D2 | 1789 | AF053138 | Homo sapiens histone deacetylase 3 gene, exons 11, 12, 13 and partial cds. | Homo sapiens | 33,512 | 28-MAR-1998 |
| | | GB_PR4: AF059650 | 16015 | AF059650 | Homo sapiens histone deacetylase 3 (HDAC3) gene, complete cds. | Homo sapiens | 38,814 | 03-MAR-1999 |
| rxa01085 | 902 | GB_EST4: H55032 | 951 | H55032 | HHU58a Sorghum bicolor cv. TX430 Sorghum bicolor cDNA | T. CRUT. bicolor | 41,111 | 27-Sep-99 |
| | | | | | clone HHU58 5′ similar to transketolase, chloroplast (TKLC1), mRNA sequence. | | | |
| | | GB_HTG2: HSBA27F12 | 123489 | AL109914 | Homo sapiens chromosome 6 clone RP11-27F12 map p22.3-24, | Homo sapiens | 35,156 | 30-Nov-99 |
| | | | | | *** SEQUENCING IN PROGRESS ***, in unordered pieces. | | | |
| | | GB_HTG2: HSBA27F12 | 123489 | AL109914 | Homo sapiens chromosome 6 clone RP11-27F12 map | Homo sapiens | 35,156 | 30-Nov-99 |
| | | | | | p22.3-24, *** SEQUENCING IN PROGRESS ***, in unordered pieces. | | | |
| rxa01088 | 1305 | GB_HTG5: AC010202 | 170004 | AC010202 | Homo sapiens chromosome 12q seeders clone RP11-210L7, | Homo sapiens | 37,313 | 6-Nov-99 |
| | | | | | *** SEQUENCING IN PROGRESS ***, 40 unordered pieces. | | | |
| | | GB_HTG5: AC010202 | 170004 | AC010202 | Homo sapiens chromosome 12q seeders clone | Homo sapiens | 37,422 | 6-Nov-99 |
| | | | | | RP11-210L7, *** SEQUENCING IN PROGRESS ***, 40 unordered pieces. | | | |
| | | GB_PR1: HSIGFACI | 7260 | X57025 | Human IGF-I mRNA for insulin-like growth factor I. | Homo sapiens | 38,043 | 17-Feb-92 |
| rxa01091 | 664 | GB_BA1: ECORELA | 4034 | J04039 | E. coli relA gene encoding ATP; GTP 3′-pyrophosphotransferase, complete cds. | Escherichia coli | 54,711 | 16-Nov-93 |
| | | GB_BA2: ECU29580 | 13234 | U29580 | Escherichia coli K-12 genome; approximately 62 minute region. | Escherichia coli | 37,327 | 5-Apr-99 |
| | | GB_BA2: AE000362 | 12595 | AE000362 | Escherichia coli K-12 MG1655 section 252 of 400 of the complete genome. | Escherichia coli | 37,327 | 12-Nov-98 |
| rxa01096 | 547 | GB_PL1: PCX24CRY | 357 | Z34459 | P. cryptogea X24 gene for cryptogein. | Phytophthora cryptogea | 43,310 | 19-Sep-96 |
| | | GB_EST24: AI244520 | 414 | AI244520 | qk14c08.x1 NCI_CGAP_Kid3 Homo sapiens cDNA clone | Homo sapiens | 33,528 | 28-Jan-99 |
| | | | | | IMAGE: 1868942 3′, mRNA sequence. | | | |
| | | GB_RO: MM26SPROT | 1479 | Y13071 | Mus musculus mRNA for 26S proteasome non-ATPase subunit. | Mus musculus | 37,941 | 10-Sep-98 |
| rxa01102 | 1368 | GB_HTG3: AC009219 | 127519 | AC009219 | Drosophila melanogaster chromosome 3 clone BACR32N16 (D973) | Drosophila melanogaster | 35,080 | 20-Aug-99 |
| | | | | | RPCI-98 32.N.16 map 86C-86C strain y; cn bw sp, *** SEQUENCING | | | |
| | | | | | IN PROGRESS***, 74 unordered pieces. | | | |
| | | GB_HTG3: AC009219 | 127519 | AC009219 | Drosophila melanogaster chromosome 3 clone BACR32N16 (D973) | Drosophila melanogaster | 35,080 | 20-Aug-99 |
| | | | | | RPCI-98 32.N.16 map 86C-86C strain y; cn bw sp, *** SEQUENCING IN | | | |
| | | | | | PROGRESS ***, 74 unordered pieces. | | | |
| | | GB_PR4: AC006065 | 191134 | AC006065 | Homo sapiens 12q24.2 BAC RPCI11-407A16 (Roswell Park | Homo sapiens | 37,453 | 27-Feb-99 |
| | | | | | Cancer Institute Human BAC Library) complete sequence. | | | |
| rxa01103 | 348 | GB_EST13: AA340958 | 338 | AA340958 | EST46332 Fetal kidney II Homo sapiens cDNA 5′ end, mRNA sequence. | Homo sapiens | 36,596 | 21-Apr-97 |
| | | GB_RO: MUSBCL22 | 5806 | L31532 | Mus musculus bcl-2 alpha gene, exon 2. | Mus musculus | 33,913 | 5-Apr-94 |
| | | GB_BA2: AE001165 | 13021 | AE001165 | Borrelia burgdorferi (section 51 of 70) of the complete genome. | Borrelia burgdorferi | 31,412 | 15-DEC-1997 |
| rxa01107 | 1323 | GB_HTG1: HS1030M6 | 173804 | AL035089 | Homo sapiens chromosome 20 clone RP5-1030M6, | Homo sapiens | 34,935 | 23-Nov-99 |
| | | | | | *** SEQUENCING IN PROGRESS ***, in unordered pieces. | | | |
| | | GB_HTG1: HS1030M6 | 173804 | AL035089 | Homo sapiens chromosome 20 clone RP5-1030M6, | Homo sapiens | 34,935 | 23-Nov-99 |
| | | | | | *** SEQUENCING IN PROGRESS ***, in unordered pieces. | | | |
| | | GB_HTG2: AC005057 | 99370 | AC005057 | Homo sapiens clone RG052H06, *** SEQUENCING | Homo sapiens | 35,897 | 12-Jun-98 |
| | | | | | IN PROGRESS ***, 11 unordered pieces. | | | |
| rxa01108 | 774 | GB_PR2: HSJ193N13 | 122961 | AL078600 | Human DNA sequence from clone RP1-193N13 on | Homo sapiens | 37,115 | 22-Nov-99 |
| | | | | | chromosome 6q21-22.31, complete sequence. | | | |
| | | GB_EST34: AV139054 | 287 | AV139054 | AV139054 Mus musculus C57BL/6J 10-11 day embryo | Mus musculus | 35,540 | 1-Jul-99 |
| | | | | | Mus musculus cDNA clone 2810048D09, mRNA sequence. | | | |
| | | GB_PL1: GTU21246 | 926 | U21246 | Gracilariopsis tenuifrons internal transcribed spacer region of the | Gracilariopsis tenuifrons | 37,200 | 12-MAR-1995 |
| | | | | | ribosomal repeat, ITS1, 5.8S rRNA gene and ITS2, complete sequence. | | | |
| rxa01109 | 765 | GB_BA1: AB003332 | 1424 | AB003332 | Anabaena variabilis rbpF gene for RNA binding protein, complete cds. | Anabaena variabilis | 35,958 | 21-MAY-1999 |
| | | GB_BA1: BPETOXOP | 9342 | L10720 | Bordetella pertussis toxin liberation operon. | Bordetella pertussis | 40,107 | 9-Jul-93 |
| | | GB_PAT: I50844 | 951 | I50844 | Sequence 12 from patent U.S. Pat. No. 5643747. | Unknown. | 39,973 | 07-OCT-1997 |
| rxa01119 | 1053 | GB_GSS3: B36708 | 438 | B36708 | HS-1041-B1-C05-MF.abi CIT Human Genomic Sperm | Homo sapiens | 37,300 | 17-OCT-1997 |
| | | | | | Library C Homo sapiens genomic clone Plate = CT 823 Col = 9 | | | |
| | | | | | Row = F, genomic survey sequence. | | | |
| | | GB_PL2: F11A17 | 102077 | AC007932 | Arabidopsis thaliana chromosome 1 BAC F11A17 sequence, complete sequence. | Arabidopsis thaliana | 37,488 | 16-Aug-99 |
| | | GB_EST22: AI043264 | 283 | AI043264 | TENU0904 T. cruzi epimastigote normalized cDNA Library | Trypanosoma cruzi | 40,989 | 1-Jul-98 |
| | | | | | Trypanosoma cruzi cDNA clone 2i14 3′, mRNA sequence. | | | |
| rxa01121 | 1209 | GB_PAT: I78756 | 737 | I78756 | Sequence 12 from patent U.S. Pat. No. 5693781. | Unknown. | 40,975 | 3-Apr-98 |
| | | GB_PAT: I92045 | 737 | I92045 | Sequence 12 from patent U.S. Pat. No. 5726299. | Unknown. | 40,975 | 01-DEC-1998 |
| | | GB_PL1: MTPACG | 100314 | X55026 | P. anserina complete mitochondrial genome. | Mitochondrion Podospora | 34,477 | 08-DEC-1997 |
| | | | | | | anserina | | |
| rxa01122 | 645 | GB_HTG4: AC010148 | 228794 | AC010148 | Homo sapiens chromosome unknown clone NH0367B19, | Homo sapiens | 42,130 | 29-OCT-1999 |
| | | | | | WORKING DRAFT SEQUENCE, in unordered pieces. | | | |
| | | GB_HTG4: AC010148 | 228794 | AC010148 | Homo sapiens chromosome unknown clone | Homo sapiens | 42,130 | 29-OCT-1999 |
| | | | | | NH0367B19, WORKING DRAFT SEQUENCE, in unordered pieces. | | | |
| | | GB_HTG4: AC010148 | 228794 | AC010148 | Homo sapiens chromosome unknown clone NH0367B19, | Homo sapiens | 37,559 | 29-OCT-1999 |
| | | | | | WORKING DRAFT SEQUENCE, in unordered pieces. | | | |
| rxa01123 | 570 | GB_EST33: AV090612 | 274 | AV090612 | AV090612 Mus musculus tongue C57BL/6J adult Mus musculus | Mus musculus | 33,212 | 28-Jun-99 |
| | | | | | cDNA clone 2310051C21, mRNA sequence. | | | |
| | | GB_EST33: AV090612 | 274 | AV090612 | AV090612 Mus musculus tongue C57BL/6J adult Mus musculus cDNA | Mus musculus | 34,529 | 28-Jun-99 |
| | | | | | clone 2310051C21, mRNA sequence. | | | |
| rxa01127 | 1143 | GB_BA1: CGLEUB | 2042 | Y09578 | C. glutamicum leuB gene. | Corynebacterium | 99,913 | 02-MAR-1999 |
| | | | | | | glutamicum | | |
| | | GB_BA1: MTV012 | 70287 | AL021287 | Mycobacterium tuberculosis H37Rv complete genome; segment 132/162. | Mycobacterium | 39,295 | 23-Jun-99 |
| | | | | | | tuberculosis | | |
| | | GB_BA1: SC1C2 | 42210 | AL031124 | Streptomyces coelicolor cosmid 1C2. | Streptomyces coelicolor | 62,456 | 15-Jan-99 |
| rxa01128 | 1137 | GB_BA1: CGLEUB | 2042 | Y09578 | C. glutamicum leuB gene. | Corynebacterium | 38,515 | 02-MAR-1999 |
| | | | | | | glutamicum | | |
| | | GB_GSS8: AQ066341 | 241 | AQ066341 | HS_2243_B1_A02_MF CIT Approved Human Genomic Sperm | Homo sapiens | 39,004 | 4-Aug-98 |
| | | | | | Library D Homo sapiens genomic clone Plate = 2243 Col = 3 | | | |
| | | | | | Row = B, genomic survey sequence. | | | |
| | | GB_EST24: AI168493 | 459 | AI168493 | ou64g08.s1 NCI_CGAP_Br2 Homo sapiens cDNA clone IMAGE: | Homo sapiens | 42,117 | 23-OCT-1998 |
| | | | | | 1632638 3′ similar to gb: D90209 DNA-BINDING PROTEIN | | | |
| | | | | | TAXREB67 (HUMAN);, mRNA sequence. | | | |
| rxa01129 | 1989 | GB_BA1: MTCI28 | 36300 | Z97050 | Mycobacterium tuberculosis H37Rv complete genome; segment 10/162. | Mycobacterium | 38,159 | 23-Jun-98 |
| | | | | | | tuberculosis | | |
| | | GB_HTG1: LMFL6852 | 37286 | AL034359 | Leishmania major chromosome 4 clone L6852 strain Freidlin, | Leishmania major | 38,485 | 29-Apr-99 |
| | | | | | *** SEQUENCING IN PROGRESS ***, in unordered pieces. | | | |
| | | GB_HTG1: LMFL6852 | 37286 | AL034359 | Leishmania major chromosome 4 clone L6852 strain Freidlin, | Leishmania major | 38,485 | 29-Apr-99 |
| | | | | | *** SEQUENCING IN PROGRESS ***, in unordered pieces. | | | |
| rxa01131 | 990 | GB_BA1: CGLEUB | 2042 | Y09578 | C. glutamicum leuB gene. | Corynebacterium | 99,313 | 02-MAR-1999 |
| | | | | | | glutamicum | | |
| | | GB_PR4: AC007253 | 225699 | AC007253 | Homo sapiens BAC clone NH0454P05 from 2, complete sequence. | Homo sapiens | 35,421 | 22-OCT-1999 |
| | | GB_HTG3: AC011305 | 171067 | AC011305 | Homo sapiens clone NH0390E09, *** SEQUENCING | Homo sapiens | 35,955 | 05-OCT-1999 |
| | | | | | IN PROGRESS ***, 1 unordered pieces. | | | |
| rxa01134 | 871 | GB_HTG4: AC009375 | 137069 | AC009375 | Drosophila melanogaster chromosome 3L/75A1 clone | Drosophila melanogaster | 37,380 | 16-OCT-1999 |
| | | | | | RPCI98-44L18, *** SEQUENCING IN PROGRESS ***, 59 unordered pieces. | | | |
| | | GB_HTG4: AC009375 | 137069 | AC009375 | Drosophila melanogaster chromosome 3L/75A1 | Drosophila melanogaster | 37,380 | 16-OCT-1999 |
| | | | | | clone RPCI98-44L18, *** SEQUENCING IN PROGRESS ***, 59 unordered pieces. | | | |
| | | GB_HTG4: AC009375 | 137069 | AC009375 | Drosophila melanogaster chromosome 3L/75A1 | Drosophila melanogaster | 38,489 | 16-OCT-1999 |
| | | | | | clone RPCI98-44L18, *** SEQUENCING IN PROGRESS ***, 59 unordered | | | |
| | | | | | pieces. | | | |
| rxa01137 | 483 | GB_IN2: AC005421 | 69992 | AC005421 | Drosophila melanogaster, chromosome 2L, region 22A1-22A1, | Drosophila melanogaster | 37,367 | 31-OCT-1998 |
| | | | | | P1 clone DS03601, complete sequence. | | | |
| | | GB_GSS1: CNS00KX9 | 1101 | AL078350 | Drosophila melanogaster genome survey sequence TET3 | Drosophila melanogaster | 30,670 | 3-Jun-99 |
| | | | | | end of BAC: BACR23A23 of RPCI-98 library from Drosophila melanogaster | | | |
| | | | | | (fruit fly), genomic survey sequence. | | | |
| | | GB_IN2: AC005421 | 69992 | AC005421 | Drosophila melanogaster, chromosome 2L, region 22A1-22A1, | Drosophila melanogaster | 33,333 | 31-OCT-1998 |
| | | | | | P1 clone DS03601, complete sequence. | | | |
| rxa01140 | 1056 | GB_PR4: AC007948 | 99904 | AC007948 | Genomic sequence of Homo sapiens clone R417F14A | Homo sapiens | 36,249 | 6-Nov-99 |
| | | | | | from chromosome 18, complete sequence. | | | |
| | | GB_HTG3: AC006278 | 140290 | AC006278 | Plasmodium falciparum chromosome 12 clone 3D7, | Plasmodium falciparum | 36,592 | 23-Sep-99 |
| | | | | | *** SEQUENCING IN PROGRESS ***, 18 unordered pieces. | | | |
| | | GB_HTG3: AC006278 | 140290 | AC006278 | Plasmodium falciparum chromosome 12 clone 3D7, | Plasmodium falciparum | 36,592 | 23-Sep-99 |
| | | | | | *** SEQUENCING IN PROGRESS ***, 18 unordered pieces. | | | |
| rxa01148 | 723 | GB_BA1: MTCY261 | 27322 | Z97559 | Mycobacterium tuberculosis H37Rv complete genome; segment 95/162. | Mycobacterium | 50,139 | 17-Jun-98 |
| | | | | | | tuberculosis | | |
| | | GB_EST15: AA501229 | 548 | AA501229 | vh62g12.r1 Knowles Solter mouse 11 5day limb bud Mus musculus | Mus musculus | 36,250 | 1-Jul-97 |
| | | | | | cDNA clone IMAGE: 891622 5′ similar to TR: G762951 G762951 | | | |
| | | | | | PRPL-2 PROTEIN;, mRNA sequence. | | | |
| | | GB_PR4: AF106062 | 1306 | AF106062 | Homo sapiens Wiskott-Aldrich syndrome protein interacting | Homo sapiens | 43,205 | 31-Jul-99 |
| | | | | | protein (WASPIP) mRNA, partial cds. | | | |
| rxa01153 | 543 | GB_BA1: MTCY261 | 27322 | Z97559 | Mycobacterium tuberculosis H37Rv complete genome; segment 95/162. | Mycobacterium | 40,000 | 17-Jun-98 |
| | | | | | | tuberculosis | | |
| | | GB_BA1: MLCB2533 | 40245 | AL035310 | Mycobacterium leprae cosmid B2533. | Mycobacterium leprae | 61,765 | 27-Aug-99 |
| | | GB_BA1: U00017 | 42157 | U00017 | Mycobacterium leprae cosmid B2126. | Mycobacterium leprae | 39,615 | 01-MAR-1994 |
| rxa01154 | 677 | GB_BA1: MTCY49 | 39430 | Z73966 | Mycobacterium tuberculosis H37Rv complete genome; segment 93/162. | Mycobacterium | 37,615 | 24-Jun-99 |
| | | | | | | tuberculosis | | |
| | | GB_BA1: U00017 | 42157 | U00017 | Mycobacterium leprae cosmid B2126. | Mycobacterium leprae | 36,957 | 01-MAR-1994 |
| | | GB_BA2: AF086832 | 10612 | AF086832 | Streptomyces coelicolor putative ferredoxin, ARC (arc), 20S | Streptomyces coelicolor | 53,354 | 30-Jun-99 |
| | | | | | proteasome beta-subunit precursor (prcB), 20S proteasome alpha-subunit | | | |
| | | | | | (prcA), putative Lacl family repressor, and putative transporter | | | |
| | | | | | genes, complete cds; and unknown genes. | | | |
| rxa01155 | 1570 | GB_BA1: MTCY49 | 39430 | Z73966 | Mycobacterium tuberculosis H37Rv complete genome; segment 93/162. | Mycobacterium | 37,025 | 24-Jun-99 |
| | | | | | | tuberculosis | | |
| | | GB_BA1: REZ82005 | 3301 | Z82005 | R. erythropolis DNA, 20S proteasome structural genes region (3301 bp). | Rhodococcus erythropolis | 54,128 | 8-Nov-97 |
| | | GB_BA2: RSU26422 | 3554 | U26422 | Rhodococcus erythropolis ORF6(2), ORF7(2), proteasome | Rhodococcus erythropolis | 45,951 | 08-OCT-1997 |
| | | | | | beta-type subunit 2 (prcB(2)), and proteasome alpha-type | | | |
| | | | | | subunit 2 (prcA(2))genes, complete cds. | | | |
| rxa01156 | 257 | GB_BA2: RSU26422 | 3554 | U26422 | Rhodococcus erythropolis ORF6(2), ORF7(2), proteasome | Rhodococcus erythropolis | 54,724 | 08-OCT-1997 |
| | | | | | beta-type subunit 2 (prcB(2)), and proteasome alpha-type subunit 2 | | | |
| | | | | | (prcA(2)) genes, complete cds. | | | |
| | | GB_HTG6: AC009218 | 126649 | AC009218 | Drosophila melanogaster chromosome 2 clone BACR33D17 | Drosophila melanogaster | 42,570 | 02-DEC-1999 |
| | | | | | (D945) RPCI-98 33.D.17 map 57B-57B strain y; cn bw sp, | | | |
| | | | | | *** SEQUENCING IN PROGRESS ***, 76 unordered pieces. | | | |
| | | GB_OV: QULNFLW | 7933 | D13223 | Japanese quail genomic DNA for neurofilament-L (NF-L). | Coturnix coturnix | 44,758 | 3-Feb-99 |
| rxa01158 | 1065 | GB_HTG3: AC011401 | 321277 | AC011401 | Homo sapiens chromosome 5 clone CIT978SKB_35K5, | Homo sapiens | 35,048 | 06-OCT-1999 |
| | | | | | *** SEQUENCING IN PROGRESS ***, 65 unordered pieces. | | | |
| | | GB_HTG3: AC011401 | 321277 | AC011401 | Homo sapiens chromosome 5 clone CIT978SKB_35K5, | Homo sapiens | 35,048 | 06-OCT-1999 |
| | | | | | *** SEQUENCING IN PROGRESS ***, 65 unordered pieces. | | | |
| | | GB_PR3: AC004386 | 172657 | AC004386 | Homo Sapiens Chromosome X clone bWXD691, complete sequence. | Homo sapiens | 37,223 | 10-Apr-98 |
| rxa01159 | 438 | GB_PAT: I92035 | 413 | I92035 | Sequence 2 from patent U.S. Pat. No. 5726299. | Unknown. | 78,169 | 01-DEC-1998 |
| | | GB_PAT: I78746 | 413 | I78746 | Sequence 2 from patent U.S. Pat. No. 5693781. | Unknown. | 78,169 | 3-Apr-98 |
| | | GB_HTG3: AC009209 | 108370 | AC009209 | Drosophila melanogaster chromosome 2 clone BACR24G16 (D1051) | Drosophila melanogaster | 43,590 | 20-Aug-99 |
| | | | | | RPCI-98 24.G.16 map 47D-47D strain y; cn bw sp, | | | |
| | | | | | *** SEQUENCING IN PROGRESS ***, 93 unordered pieces. | | | |
| rxa01160 | 998 | GB_PAT: I78746 | 413 | I78746 | Sequence 2 from patent U.S. Pat. No. 5693781. | Unknown. | 96,032 | 3-Apr-98 |
| | | GB_PAT: I92035 | 413 | I92035 | Sequence 2 from patent U.S. Pat. No. 5726299. | Unknown. | 96,032 | 01-DEC-1998 |
| | | GB_BA2: AF014804 | 6449 | AF014804 | Neisseria meningitidis PgIB (pgIB), PgIC (pgIC), PgID (pgID), and | Neisseria meningitidis | 37,977 | 3-Sep-99 |
| | | | | | AvtA (avtA) genes, complete cds. | | | |
| rxa01165 | 696 | GB_HTG2: AC007851 | 128979 | AC007851 | Drosophila melanogaster chromosome 2 clone BACR06M19 (D615) | Drosophila melanogaster | 37,900 | 2-Aug-99 |
| | | | | | RPCI-98 06.M.19 map 50C-50D strain y; cn bw sp, *** SEQUENCING IN | | | |
| | | | | | PROGRESS ***, 86 unordered pieces. | | | |
| | | GB_HTG2: AC007851 | 128979 | AC007851 | Drosophila melanogaster chromosome 2 clone BACR06M19 (D615) | Drosophila melanogaster | 37,900 | 2-Aug-99 |
| | | | | | RPCI-98 06.M.19 map 50C-50D strain y; cn bw sp, *** SEQUENCING IN | | | |
| | | | | | PROGRESS ***, 86 unordered pieces. | | | |
| | | GB_HTG2: AC007851 | 128979 | AC007851 | Drosophila melanogaster chromosome 2 clone BACR06M19 (D615) | Drosophila melanogaster | 34,114 | 2-Aug-99 |
| | | | | | RPCI-98 06.M.19 map 50C-50D strain y; cn bw sp, *** SEQUENCING IN | | | |
| | | | | | PROGRESS***, 86 unordered pieces. | | | |
| rxa01166 | 1428 | GB_BA1: LEUG6PD | 1957 | M64446 | L. mesenteroides glucose-6-phosphate dehydrogenase gene, complete cds. | Leuconostoc | 41,259 | 26-Apr-93 |
| | | | | | | mesenteroides | | |
| | | GB_HTG3: AF188026 | 101456 | AF188026 | Homo sapiens chromosome 8 clone BAC 2379L20 | Homo sapiens | 35,535 | 08-OCT-1999 |
| | | | | | map 8q24, *** SEQUENCING IN PROGRESS ***, in ordered pieces. | | | |
| | | GB_HTG3: AF188026 | 101456 | AF188026 | Homo sapiens chromosome 8 clone BAC 2379L20 | Homo sapiens | 35,535 | 08-OCT-1999 |
| | | | | | map 8q24, *** SEQUENCING IN PROGRESS ***, in ordered pieces. | | | |
| rxa01167 | 519 | GB_PR2: HS1026E2 | 100418 | AL022143 | Human DNA sequence from clone 1026E2 on chromosome | Homo sapiens | 38,281 | 23-Nov-99 |
| | | | | | 1q24.1-25.3 EST, CA repeat, STS, GSS, complete sequence. | | | |
| | | GB_EST36: AI900015 | 496 | AI900015 | sb97f05.y1 Gm-c1012 Glycine max cDNA clone | Glycine max | 42,045 | 06-DEC-1999 |
| | | | | | GENOME SYSTEMS CLONE ID: Gm-c1012-634 5′ similar to WP: T11G6.8 | | | |
| | | | | | CE06432 RNA RECOGNITION MOTIF.;, mRNA sequence. | | | |
| | | GB_PR2: HS1026E2 | 100418 | AL022143 | Human DNA sequence from clone 1026E2 on chromosome | Homo sapiens | 40,990 | 23-Nov-99 |
| | | | | | 1q24.1-25.3 EST, CA repeat, STS, GSS, complete sequence. | | | |
| rxa01169 | 1119 | GB_HTG2: AC005978 | 92586 | AC005978 | Drosophila melanogaster chromosome 2 clone DS00678 (D449) map | Drosophila melanogaster | 34,266 | 30-Jul-99 |
| | | | | | 59D3-59D4 strain y; cn bw sp, *** SEQUENCING | | | |
| | | | | | IN PROGRESS ***, 6 unordered pieces. | | | |
| | | GB_HTG2: AC005978 | 92586 | AC005978 | Drosophila melanogaster chromosome 2 clone DS00678 (D449) | Drosophila melanogaster | 34,266 | 30-Jul-99 |
| | | | | | map 59D3-59D4 strain y; cn bw sp, *** SEQUENCING | | | |
| | | | | | IN PROGRESS ***, 6 unordered pieces. | | | |
| | | GB_HTG3: AC008304 | 91552 | AC008304 | Drosophila melanogaster chromosome 2 clone BACR04G19 (D646) RPCI-98 | Drosophila melanogaster | 31,278 | 20-Sep-99 |
| | | | | | 04.G.19 map 59D2-59D3 strain y; cn bw sp, *** SEQUENCING IN | | | |
| | | | | | PROGRESS ***, 90 unordered pieces. | | | |
| rxa01170 | 606 | GB_PR1: AB014524 | 6542 | AB014524 | Homo sapiens mRNA for KIAA0624 protein, partial cds. | Homo sapiens | 43,478 | 6-Feb-99 |
| | | GB_EST38: AW016078 | 496 | AW016078 | UI-H-BI0p-abf-h-01-0-UI.s1 NCI_CGAP_Sub2 Homo sapiens | Homo sapiens | 36,667 | 10-Sep-99 |
| | | | | | cDNA clone IMAGE: 2711665 3′, mRNA sequence. | | | |
| | | GB_EST24: AI193238 | 323 | AI193238 | qe56c06.x1 Soares_fetal_lung_NbHL19W Homo sapiens | Homo sapiens | 37,427 | 29-OCT-1998 |
| | | | | | cDNA clone IMAGE: 1742986 3′, mRNA sequence. | | | |
| rxa01171 | 816 | GB_HTG2: AC007548 | 110249 | AC007548 | Drosophila melanogaster chromosome 2 clone BACR48M17 (D614) | Drosophila melanogaster | 35,634 | 2-Aug-99 |
| | | | | | RPCI-98 48.M.17 map 41C-41D strain y; cn bw sp, *** SEQUENCING IN | | | |
| | | | | | PROGRESS ***, 66 unordered pieces. | | | |
| | | GB_PR3: HS273F20 | 111253 | AL034371 | Human DNA sequence from clone 273F20 on chromosome | Homo sapiens | 34,582 | 23-Nov-99 |
| | | | | | 6q16.1-16.3 Contains ESTs, STSs and GSSs, complete sequence. | | | |
| | | GB_HTG2: AC007548 | 110249 | AC007548 | Drosophila melanogaster chromosome 2 clone BACR48M17 (D614) | Drosophila melanogaster | 35,634 | 2-Aug-99 |
| | | | | | RPCI-98 48.M.17 map 41C-41D strain y; cn bw sp, *** SEQUENCING IN | | | |
| | | | | | PROGRESS ***, 66 unordered pieces. | | | |
| rxa01173 | 738 | GB_GSS8: B93272 | 338 | B93272 | CIT-HSP-2171E14.TF CIT-HSP Homo sapiens genomic | Homo sapiens | 42,012 | 25-Jun-98 |
| | | | | | clone 2171E14, genomic survey sequence. | | | |
| | | GB_EST35: AV156265 | 282 | AV156265 | AV156265 Mus musculus head C57BL/6J 12-day embryo | Mus musculus | 41,350 | 7-Jul-99 |
| | | | | | Mus musculus cDNA clone 3000001I03, mRNA sequence. | | | |
| | | GB_RO: AF035777 | 2154 | AF035777 | Mus musculus somatostatin receptor subtype 5 (sst5) gene, complete cds. | Mus musculus | 38,928 | 05-DEC-1997 |
| rxa01174 | 873 | GB_HTG1: CEY51A2_3 | 110000 | Z99275 | Caenorhabditis elegans chromosome V clone Y51A2, | Caenorhabditis elegans | 38,045 | 3-Dec-98 |
| | | | | | *** SEQUENCING IN PROGRESS ***, in unordered pieces. | | | |
| | | GB_IN1: CEY51A2D | 139259 | AL021497 | Caenorhabditis elegans cosmid Y51A2D, complete sequence. | Caenorhabditis elegans | 38,045 | 2-Sep-99 |
| | | GB_HTG1: CEY51A2_3 | 110000 | Z99275 | Caenorhabditis elegans chromosome V clone Y51A2, | Caenorhabditis elegans | 38,045 | 3-Dec-98 |
| | | | | | *** SEQUENCING IN PROGRESS ***, in unordered pieces. | | | |
| rxa01176 | 627 | GB_BA1: MTV021 | 23400 | AL021957 | Mycobacterium tuberculosis H37Rv complete genome; segment 97/162. | Mycobacterium | 39,159 | 18-Jun-98 |
| | | | | | | tuberculosis | | |
| | | GB_BA1: MSGB1551CS | 36548 | L78813 | Mycobacterium leprae cosmid B1551 DNA sequence. | Mycobacterium leprae | 53,215 | 15-Jun-96 |
| | | GB_BA1: MSGB1554CS | 36548 | L78814 | Mycobacterium leprae cosmid B1554 DNA sequence. | Mycobacterium leprae | 53,215 | 15-Jun-96 |
| rxa01177 | | | | | | | | |
| rxa01178 | 573 | GB_PR4: AC006126 | 46100 | AC006126 | Homo sapiens chromosome 19, cosmid F18718, complete sequence. | Homo sapiens | 36,832 | 17-DEC-1998 |
| | | GB_PR4: AC006126 | 46100 | AC006126 | Homo sapiens chromosome 19, cosmid F18718, complete sequence. | Homo sapiens | 40,463 | 17-DEC-1998 |
| | | GB_EST23: AI128078 | 443 | AI128078 | qc47d10.x1 Soares_pregnant_uterus_NbHPU Homo sapiens cDNA clone | Homo sapiens | 38,318 | 27-OCT-1998 |
| | | | | | IMAGE: 1712755 3′ similar to SW: IF16_HUMAN Q16666 GAMMA- | | | |
| | | | | | INTERFERON-INDUCIBLE PROTEIN IFI-16;, mRNA sequence. | | | |
| rxa01184 | 1596 | GB_HTG2: HSG248A21 | 96783 | AL118512 | Homo sapiens chromosome 1 clone GS1-248A21, | Homo sapiens | 36,994 | 30-Nov-99 |
| | | | | | *** SEQUENCING IN PROGRESS ***, in unordered pieces. | | | |
| | | GB_HTG2: HSG248A21 | 96783 | AL118512 | Homo sapiens chromosome 1 clone GS1-248A21, | Homo sapiens | 36,994 | 30-Nov-99 |
| | | | | | *** SEQUENCING IN PROGRESS ***, in unordered pieces. | | | |
| | | GB_PR3: AC004237 | 38715 | AC004237 | Homo sapiens chromosome 5, P1 clone 565a12 (LBNL H23), complete sequence. | Homo sapiens | 36,514 | 27-Feb-98 |
| rxa01186 | 1221 | GB_BA1: MTCY274 | 39991 | Z74024 | Mycobacterium tuberculosis N37Rv complete genome; segment 126/162. | Mycobacterium | 34,758 | 19-Jun-98 |
| | | | | | | tuberculosis | | |
| | | GB_BA1: SC6A9 | 39461 | AL031035 | Streptomyces coelicolor cosmid 6A9. | Streptomyces coelicolor | 38,500 | 24-Jul-98 |
| | | GB_BA2: AE000689 | 14698 | AE000689 | Aquifex aeolicus section 21 of 109 of the complete genome. | Aquifex aeolicus | 45,379 | 25-MAR-1998 |
| rxa01187 | 573 | GB_EST5: H60943 | 361 | H60943 | yr14g08.r1 Soares fetal liver spleen 1NFLS Homo sapiens cDNA clone IMAGE: | Homo sapiens | 39,205 | 06-OCT-1995 |
| | | | | | 205310 5′, mRNA sequence. | | | |
| | | GB_GSS1: AG018858 | 570 | AG018858 | Homo sapiens genomic DNA, 21q region, clone: B125C11 SpN045(−21), genomic | Homo sapiens | 41,423 | 10-OCT-1999 |
| | | | | | survey sequence. | | | |
| | | GB_GSS13: AQ454839 | 505 | AQ454839 | HS_5218_A1_E03_T7A RPCI-11 Human Male BAC Library | Homo sapiens | 34,599 | 21-Apr-99 |
| | | | | | Homo sapiens genomic clone Plate = 794 Col = 5 Row = I, genomic survey sequence. | | | |
| rxa01195 | 570 | GB_PR3: AF022813 | 1358 | AF022813 | Homo sapiens tetraspan (NAG-2) mRNA, complete cds. | Homo sapiens | 40,614 | 18-Nov-97 |
| | | GB_EST34: AI798721 | 765 | AI798721 | we91g10.x1 Soares_NFL_T_GBC_S1 Homo sapiens cDNA clone IMAGE: | Homo sapiens | 35,256 | 6-Jul-99 |
| | | | | | 2348514 3′ similar to SW: NAG2_HUMAN O14817 NOVEL ANTIGEN 2;, | | | |
| | | | | | mRNA sequence. | | | |
| | | GB_EST34: AI808898 | 696 | AI808898 | wf66d02.x1 Soares_NFL_T_GBC_S1 Homo sapiens cDNA clone IMAGE: | Homo sapiens | 35,354 | 7-Jul-99 |
| | | | | | 2360547 3′ similar to SW: NAG2_HUMAN O14817 NOVEL ANTIGEN 2;, | | | |
| | | | | | mRNA sequence. | | | |
| rxa01196 | 813 | GB_BA1: MSGY151 | 37036 | AD000018 | Mycobacterium tuberculosis sequence from clone y151. | Mycobacterium | 36,634 | 10-DEC-1996 |
| | | | | | | tuberculosis | | |
| | | GB_BA1: MTCY130 | 32514 | Z73902 | Mycobacterium tuberculosis H37Rv complete genome; segment 59/162. | Mycobacterium | 59,596 | 17-Jun-98 |
| | | | | | | tuberculosis | | |
| | | GB_BA1: MSGY151 | 37036 | AD000018 | Mycobacterium tuberculosis sequence from clone y151. | Mycobacterium | 39,567 | 10-DEC-1996 |
| | | | | | | tuberculosis | | |
| rxa01197 | 576 | GB_EST18: AA676822 | 524 | AA676822 | zj65c11.s1 Soares_fetal_liver_spleen_1NFLS_S1 Homo sapiens cDNA clone | Homo sapiens | 40,741 | 19-DEC-1997 |
| | | | | | IMAGE: 455156 3′, mRNA sequence. | | | |
| | | GB_EST18: AA676822 | 524 | AA676822 | zj65c11.s1 Soares_fetal_liver_spleen_1NFLS_S1 Homo sapiens cDNA clone | Homo sapiens | 40,331 | 19-DEC-1997 |
| | | | | | IMAGE: 455156 3′, mRNA sequence. | | | |
| rxa01198 | 426 | GB_HTG4: AC010195 | 164935 | AC010195 | Homo sapiens chromosome 10 clone RPCI11-587C2, *** SEQUENCING | Homo sapiens | 36,058 | 21-OCT-1999 |
| | | | | | IN PROGRESS ***, 61 unordered pieces. | | | |
| | | GB_HTG4: AC010195 | 164935 | AC010195 | Homo sapiens chromosome 10 clone RPCI11-587C2, *** SEQUENCING | Homo sapiens | 36,058 | 21-OCT-1999 |
| | | | | | IN PROGRESS ***, 61 unordered pieces. | | | |
| | | GB_HTG1: CEY44A6 | 326074 | Z98863 | Caenorhabditis elegans chromosome V clone Y44A6, *** SEQUENCING | Caenorhabditis elegans | 39,151 | 03-DEC-1998 |
| | | | | | IN PROGRESS ***, in unordered pieces. | | | |
| rxa01206 | 400 | GB_HTG1: CER08A5 | 51920 | Z82281 | Caenorhabditis elegans chromosome V clone R08A5, *** SEQUENCING | Caenorhabditis elegans | 43,557 | 14-OCT-1998 |
| | | | | | IN PROGRESS ***, in unordered pieces. | | | |
| | | GB_HTG1: CER08A5 | 51920 | Z82281 | Caenorhabditis elegans chromosome V clone R08A5, *** SEQUENCING | Caenorhabditis elegans | 43,557 | 14-OCT-1998 |
| | | | | | IN PROGRESS ***, in unordered pieces. | | | |
| | | GB_HTG1: CER08A5 | 51920 | Z82281 | Caenorhabditis elegans chromosome V clone R08A5, *** SEQUENCING | Caenorhabditis elegans | 34,987 | 14-OCT-1998 |
| | | | | | IN PROGRESS ***, in unordered pieces. | | | |
| rxa01207 | 771 | GB_PL2: SPBC8D2 | 43757 | AL022072 | S. pombe chromosome II cosmid c8D2. | Schizosaccharomyces | 36,566 | 24-Nov-99 |
| | | | | | | pombe | | |
| | | GB_PL1: AB004538 | 38911 | AB004538 | Schizosaccharomyces pombe 39 kb genomic DNA, clone c568. | Schizosaccharomyces | 36,148 | 15-Jul-97 |
| | | | | | | pombe | | |
| | | GB_HTG6: AC009220 | 110000 | AC009220 | Homo sapiens chromosome 7, *** SEQUENCING | Homo sapiens | 33,940 | 15-Sep-99 |
| | | | | | IN PROGRESS ***, 191 unordered pieces. | | | |
| rxa01210 | 954 | GB_GSS4: AQ694235 | 530 | AQ694235 | HS_5496_A1_D03_T7A RPCI-11 Human Male BAC Library | Homo sapiens | 37,259 | 6-Jul-99 |
| | | | | | Homo sapiens genomic clone Plate = 1072 Col = 5 | | | |
| | | | | | Row = G, genomic survey sequence. | | | |
| | | GB_GSS11: AQ322059 | 519 | AQ322059 | RPCI11-100G10.TV RPCI-11 Homo sapiens genomic clone | Homo sapiens | 37,229 | 06-MAY-1999 |
| | | | | | RPCI-11-100G10, genomic survey sequence. | | | |
| | | GB_BA1: SCH24 | 41625 | AL049826 | Streptomyces coelicolor cosmid H24. | Streptomyces coelicolor | 38,126 | 11-MAY-1999 |
| rxa01213 | 1350 | GB_PR3: HS356B7 | 20733 | AL031714 | Human DNA sequence from clone 356B7 on chromosome 16. | Homo sapiens | 36,684 | 23-Nov-99 |
| | | | | | Contains the UBE21 gene for ubiquitin-conjugating enzyme E2I (homologous to yeast | | | |
| | | | | | UBC9), and an RPS20 (40S Ribosomal protein S20) pseudogene. Contains ESTs, | | | |
| | | | | | STSs. GSSs and a putative CpG island, complete sequence. | | | |
| | | GB_PR3: HS356B7 | 20733 | AL031714 | Human DNA sequence from clone 356B7 on chromosome 16. | Homo sapiens | 39,621 | 23-Nov-99 |
| | | | | | Contains the UBE21 gene for ubiquitin-conjugating enzyme E2I (homologous to yeast | | | |
| | | | | | UBC9), and an RPS20 (40S Ribosomal protein S20) pseudogene. Contains ESTs, | | | |
| | | | | | STSs. GSSs and a putative CpG island, complete sequence. | | | |
| | | GB_PR1: HSEF1AL1 | 1815 | X16870 | Human DNA for elongation factor 1-alpha | Homo sapiens | 37,462 | 12-Jun-90 |
| | | | | | (clone lambda-1). | | | |
| rxa01218 | 552 | GB_PR3: HS257I9 | 90695 | AL031773 | Human DNA sequence from clone 257I9 on chromosome 6q25.1-26 | Homo sapiens | 35,897 | 23-Nov-99 |
| | | | | | Contains gene similar to Cytochrome B, CA repeat, GSS, complete sequence. | | | |
| | | GB_PR3: HS287L14 | 112831 | Z95325 | Human DNA sequence from clone 287L14 on chromosome Xq21.1-21.33 | Homo sapiens | 37,778 | 23-Nov-99 |
| | | | | | Contains STSs and GSSs, complete sequence. | | | |
| | | GB_EST8: AA035251 | 493 | AA035251 | zk23d09.s1 Soares_pregnant_uterus_NbHPU Homo sapiens cDNA | Homo sapiens | 40,191 | 10-MAY-1997 |
| | | | | | clone IMAGE: 471377 3′, mRNA sequence. | | | |
| rxa01229 | 1401 | GB_PR4: HUAC002394 | 107910 | AC002394 | Human Chromosome 16 BAC clone CIT987SK-A-211C6, complete sequence. | Homo sapiens | 33,633 | 23-Nov-99 |
| | | GB_OV: AF138905 | 1678 | AF138905 | Gallus gallus NK class homeodomain transcription factor | Gallus gallus | 30,556 | 4-Sep-99 |
| | | | | | NKX3.2 mRNA, complete cds. | | | |
| | | GB_PAT: AR031772 | 30001 | AR031772 | Sequence 1 from patent U.S. Pat. No. 5866410. | Unknown. | 34,304 | 29-Sep-99 |
| rxa01231 | 366 | GB_EST25: AI295169 | 507 | AI295169 | LP08720.3prime LP Drosophila melanogaster larval-early | Drosophila melanogaster | 38,279 | 01-DEC-1998 |
| | | | | | pupal pOT2 Drosophila melanogaster cDNA clone LP08720 | | | |
| | | | | | 3prime, mRNA sequence. | | | |
| | | GB_EST25: AI297653 | 512 | AI297653 | LP12002.3prime LP Drosophila melanogaster larval-early | Drosophila melanogaster | 36,893 | 01-DEC-1998 |
| | | | | | pupal pOT2 Drosophila melanogaster cDNA clone LP12002 | | | |
| | | | | | 3prime, mRNA sequence. | | | |
| | | GB_EST21: AA951454 | 677 | AA951454 | LD31920.5prime LD Drosophila melanogaster embryo | Drosophila melanogaster | 44,167 | 24-Nov-98 |
| | | | | | pOT2 Drosophila melanogaster cDNA clone LD31920 5prime, | | | |
| | | | | | mRNA sequence. | | | |
| rxa01234 | 507 | GB_GSS12: AQ365352 | 431 | AQ365352 | nbxb0063L13f CUGI Rice BAC Library | Oryza sativa | 34,577 | 3-Feb-99 |
| | | | | | Oryza sativa genomic clone nbxb0063L13f, genomic | | | |
| | | | | | survey sequence. | | | |
| | | GB_PR4: AC007544 | 119034 | AC007544 | Homo sapiens Human 12p11-37.2-54.4 BAC RPCI11-12D15 (Roswell Park Cancer | Homo sapiens | 34,350 | 29-OCT-1999 |
| | | | | | Institute Human BAC Library) complete sequence. | | | |
| | | GB_PR4: AC007544 | 119034 | AC007544 | Homo sapiens Human 12p11-37.2-54.4 BAC RPCI11-12D15 (Roswell Park Cancer | Homo sapiens | 37,988 | 29-OCT-1999 |
| | | | | | Institute Human BAC Library) complete sequence. | | | |
| rxa01237 | 564 | GB_GSS1: AG009269 | 706 | AG009269 | Homo sapiens genomic DNA, 21q region, clone: 31C6X11, genomic survey sequence. | Homo sapiens | 36,328 | 14-Apr-99 |
| | | GB_GSS1: AG009269 | 706 | AG009269 | Homo sapiens genomic DNA, 21q region, clone: 31C6X11, genomic survey sequence. | Homo sapiens | 37,391 | 14-Apr-99 |
| rxa01246 | 630 | GB_HTG2: AC007646 | 180133 | AC007646 | Drosophila melanogaster chromosome 3 clone BACR03J04 (D687) RPCI-98 | Drosophila melanogaster | 38,188 | 2-Aug-99 |
| | | | | | 03.J.4 map 87F-87F strain y; cn bw sp, *** SEQUENCING IN | | | |
| | | | | | PROGRESS ***, 10 unordered pieces. | | | |
| | | GB_HTG2: AC007646 | 180133 | AC007646 | Drosophila melanogaster chromosome 3 clone BACR03J04 (D687) RPCI-98 | Drosophila melanogaster | 38,188 | 2-Aug-99 |
| | | | | | 03.J.4 map 87F-87F strain y; cn bw sp, *** SEQUENCING IN | | | |
| | | | | | PROGRESS ***, 10 unordered pieces. | | | |
| | | GB_HTG4: AC009492 | 212394 | AC009492 | Homo sapiens clone NH0423F09, *** SEQUENCING IN | Homo sapiens | 38,762 | 29-OCT-1999 |
| | | | | | PROGRESS ***, 2 unordered pieces. | | | |
| rxa01249 | 471 | GB_EST7: W84105 | 361 | W84105 | T2969 MVAT4 bloodstream form of serodeme WRATat1.1 Trypanosoma brucei | Trypanosoma brucei | 38,261 | 12-Aug-96 |
| | | | | | rhodesiense cDNA 5′, mRNA sequence. | rhodesiense | | |
| | | GB_EST7: W84105 | 361 | W84105 | T2969 MVAT4 bloodstream form of serodeme WRATat1.1 Trypanosoma brucei | Trypanosoma brucei | 33,894 | 12-Aug-96 |
| | | | | | rhodesiense cDNA 5′, mRNA sequence. | rhodesiense | | |
| rxa01251 | 432 | GB_RO: AC005240 | 41830 | AC005240 | Mus musculus clone UWGC: magap from 14D1-D2 (T-cell Receptor | Mus musculus | 41,463 | 8-Jul-98 |
| | | | | | Alpha Locus), complete sequence. | | | |
| | | GB_RO: AC004101 | 39491 | AC004101 | Mouse Cosmid ma53a016 from 14D1-D2, complete sequence. | Mus musculus | 41,463 | 2-Feb-98 |
| | | GB_HTG3: AC009837 | 162287 | AC009837 | Homo sapiens chromosome 17 clone 550_K_23 map 17, | Homo sapiens | 36,131 | 2-Sep-99 |
| | | | | | *** SEQUENCING IN PROGRESS ***, 13 unordered pieces. | | | |
| rxa01263 | 1035 | GB_PR4: AC005919 | 156300 | AC005919 | Homo sapiens chromosome 17, clone hRPK.142_H_19, complete sequence. | Homo sapiens | 39,822 | 18-Nov-98 |
| | | GB_PR4: AC005919 | 156300 | AC005919 | Homo sapiens chromosome 17, clone hRPK.142_H_19, complete sequence. | Homo sapiens | 38,319 | 18-Nov-98 |
| | | GB_HTG1: CEY71A12_3 | 110000 | AL021390 | Caenorhabditis elegans chromosome I clone Y71A12, *** SEQUENCING | Caenorhabditis elegans | 36,884 | 15-Sep-99 |
| | | | | | IN PROGRESS ***, in unordered pieces. | | | |
| rxa01266 | 1158 | GB_HTG4: AC010775 | 165565 | AC010775 | Homo sapiens clone 2_G_17, *** SEQUENCING IN | Homo sapiens | 38,670 | 20-OCT-1999 |
| | | | | | PROGRESS ***, 14 unordered pieces. | | | |
| | | GB_HTG4: AC010775 | 165565 | AC010775 | Homo sapiens clone 2_G_17, *** SEQUENCING IN | Homo sapiens | 38,670 | 20-OCT-1999 |
| | | | | | PROGRESS ***, 14 unordered pieces. | | | |
| | | GB_HTG4: AC010775 | 165565 | AC010775 | Homo sapiens clone 2_G_17, *** SEQUENCING IN | Homo sapiens | 36,131 | 20-OCT-1999 |
| | | | | | PROGRESS ***, 14 unordered pieces. | | | |
| rxa01267 | 1437 | GB_PR3: AF070717 | 100793 | AF070717 | Homo sapiens BAC clone 393I22 from 8q21, complete sequence. | Homo sapiens | 38,826 | 2-Jul-98 |
| | | GB_BA2: MPU34931 | 2571 | U34931 | Mycoplasma pulmonis FtsZ (ftsZ) gene, complete cds, methionyl-tRNA | Mycoplasma pulmonis | 37,092 | 30-MAY-1996 |
| | | | | | synthetase (metG) gene, partial cds. | | | |
| | | GB_EST25: AI322057 | 638 | AI322057 | SWOv3MCAM09A04SK Onchocerca volvulus molting L3 larva | Onchocerca volvulus | 40,566 | 22-DEC-1998 |
| | | | | | cDNA (SL96MLW-OvmL3) Onchocerca volvulus cDNA clone | | | |
| | | | | | SWOv3MCAM09A04 5′, mRNA sequence. | | | |
| rxa01268 | 963 | GB_HTG3: AC010878 | 288945 | AC010878 | Homo sapiens clone NH0230E20, *** SEQUENCING | Homo sapiens | 36,496 | 25-Sep-99 |
| | | | | | IN PROGRESS ***, 65 unordered pieces. | | | |
| | | GB_HTG3: AC010878 | 288945 | AC010878 | Homo sapiens clone NH0230E20, *** SEQUENCING | Homo sapiens | 36,496 | 25-Sep-99 |
| | | | | | IN PROGRESS ***, 65 unordered pieces. | | | |
| | | GB_HTG3: AC010878 | 288945 | AC010878 | Homo sapiens clone NH0230E20, *** SEQUENCING | Homo sapiens | 36,354 | 25-Sep-99 |
| | | | | | IN PROGRESS ***, 65 unordered pieces. | | | |
| rxa01271 | 1935 | GB_BA2: U67549 | 14561 | U67549 | Methanococcus jannaschii section 91 of 150 of the complete genome. | Methanococcus jannaschii | 37,841 | 28-Jan-98 |
| | | GB_PR2: HSJ836N17 | 111694 | AL049539 | Human DNA sequence from clone RP5-836N17 on chromosome | Homo sapiens | 34,872 | 22-Nov-99 |
| | | | | | 20q11.1-11.21, complete sequence. | | | |
| | | GB_OV: AF089743 | 30676 | AF089743 | Morone saxatilis homeodomain protein Hox-A10 (Hoxa10), | Morone saxatilis | 36,738 | 2-Aug-99 |
| | | | | | homeodomain protein Hox-A9 (Hoxa9), homeodomain protein Hox-A7 (Hoxa7), | | | |
| | | | | | homeodomain protein Hox-A5 (Hoxa5), and homeodomain protein | | | |
| | | | | | Hox-A4 (Hoxa4) genes, complete cds. | | | |
| rxa01273 | 1557 | GB_PR3: AC004070 | 110192 | AC004070 | Human Chromosome X, complete sequence. | Homo sapiens | 37,679 | 29-Jan-98 |
| | | GB_PR2: AC002410 | 96217 | AC002410 | Human BAC clone RG264L19 from 7p15-p21, complete sequence. | Homo sapiens | 38,587 | 11-Aug-97 |
| | | GB_PR2: AC002410 | 96217 | AC002410 | Human BAC clone RG264L19 from 7p15-p21, complete sequence. | Homo sapiens | 37,035 | 11-Aug-97 |
| rxa01275 | 1041 | GB_EST8: C03322 | 357 | C03322 | C03322 Human heart cDNA (YNakamura) Homo sapiens cDNA | Homo sapiens | 35,393 | 30-Jul-96 |
| | | | | | clone 3NHC1263, mRNA sequence. | | | |
| | | GB_EST4: R92079 | 410 | R92079 | yp96g02.r1 Soares fetal liver spleen 1NFLS Homo sapiens cDNA | Homo sapiens | 37,010 | 25-Aug-95 |
| | | | | | clone IMAGE: 195314 5′, mRNA sequence. | | | |
| | | GB_EST4: H57724 | 461 | H57724 | yr21a12.r1 Soares fetal liver spleen 1NFLS Homo sapiens cDNA | Homo sapiens | 37,281 | 05-OCT-1995 |
| | | | | | clone IMAGE: 205918 5′, mRNA sequence. | | | |
| rxa01276 | 567 | GB_OM: OCMYLC1 | 962 | X54041 | Rabbit mRNA for myosin light chain 1. | Oryctolagus cuniculus | 40,503 | 26-Nov-90 |
| | | GB_PR3: AC005383 | 123110 | AC005383 | Homo sapiens chromosome 10 clone CIT987SK-1144G6 map | Homo sapiens | 38,930 | 31-OCT-1998 |
| | | | | | 10q25.1, complete sequence. | | | |
| | | GB_RO: RATPTPECA | 2155 | D78610 | Rat mRNA for protein tyrosine phosphatase epsilon C, partial cds. | Rattus norvegicus | 37,770 | 5-Feb-99 |
| rxa01281 | 885 | GB_HTG4: AC009366 | 199607 | AC009366 | Drosophila melanogaster chromosome 3L/79D4 clone RPCI98-48E10, | Drosophila melanogaster | 34,025 | 16-OCT-1999 |
| | | | | | *** SEQUENCING IN PROGRESS ***, 31 unordered pieces. | | | |
| | | GB_HTG4: AC009366 | 199607 | AC009366 | Drosophila melanogaster chromosome 3L/79D4 clone RPCI98-48E10, | Drosophila melanogaster | 34,025 | 16-OCT-1999 |
| | | | | | *** SEQUENCING IN PROGRESS ***, 31 unordered pieces. | | | |
| | | GB_HTG4: AC009366 | 199607 | AC009366 | Drosophila melanogaster chromosome 3L/79D4 clone RPCI98-48E10, | Drosophila melanogaster | 34,386 | 16-OCT-1999 |
| | | | | | *** SEQUENCING IN PROGRESS ***, 31 unordered pieces. | | | |
| rxa01282 | 903 | GB_GSS11: AQ263970 | 363 | AQ263970 | CITBI-E1-2503H24.TF CITBI-E1 Homo sapiens genomic | Homo sapiens | 40,361 | 27-OCT-1998 |
| | | | | | clone 2503H24, genomic survey sequence. | | | |
| | | GB_GSS1: FR0025959 | 603 | AL018794 | F. rubripes GSS sequence, clone 165E10aE1, genomic | Fugu rubripes | 34,824 | 10-DEC-1997 |
| | | | | | survey sequence. | | | |
| | | GB_GSS9: AQ102435 | 334 | AQ102435 | HS_3038_B2_D09_MF CIT Approved Human Genomic Sperm Library D | Homo sapiens | 37,624 | 27-Aug-98 |
| | | | | | Homo sapiens genomic clone Plate = 3038 Col = 18 Row = H, | | | |
| | | | | | genomic survey sequence. | | | |
| rxa01294 | 789 | GB_PL2: AC007258 | 144422 | AC007258 | Arabidopsis thaliana chromosome I BAC F23H11 genomic sequence, | Arabidopsis thaliana | 39,453 | 16-Jun-99 |
| | | | | | complete sequence. | | | |
| | | GB_EST17: T04634 | 491 | T04634 | 681 Lambda-PRL1 Arabidopsis thaliana cDNA clone SBD1T7P, mRNA sequence. | Arabidopsis thaliana | 38,693 | 6-Nov-97 |
| | | GB_PL2: AC007258 | 144422 | AC007258 | Arabidopsis thaliana chromosome I BAC F23H11 genomic sequence, | Arabidopsis thaliana | 36,170 | 16-Jun-99 |
| | | | | | complete sequence. | | | |
| rxa01295 | 1098 | GB_HTG3: AC009803 | 235360 | AC009803 | Homo sapiens clone RPCI11-1028N23, *** SEQUENCING | Homo sapiens | 38,662 | 24-Sep-99 |
| | | | | | IN PROGRESS ***, 47 unordered pieces. | | | |
| | | GB_HTG3: AC009803 | 235360 | AC009803 | Homo sapiens clone RPCI11-1028N23, *** SEQUENCING | Homo sapiens | 38,662 | 24-Sep-99 |
| | | | | | IN PROGRESS ***, 47 unordered pieces. | | | |
| | | GB_IN2: AC004333 | 63178 | AC004333 | Drosophila melanogaster DNA sequence (P1 DS05969 (D229)), complete sequence. | Drosophila melanogaster | 39,252 | 20-Jun-98 |
| rxa01296 | 1206 | GB_PR4: AC004961 | 68130 | AC004961 | Homo sapiens clone DJ1098J04, complete sequence. | Homo sapiens | 39,409 | 5-Jun-99 |
| | | GB_GSS14: AQ525299 | 447 | AQ525299 | HS_5227_B2_H03_SP6E RPCI-11 Human Male BAC Library | Homo sapiens | 37,330 | 11-MAY-1999 |
| | | | | | Homo sapiens genomic clone Plate = 803 Col = 6 Row = P, genomic survey sequence. | | | |
| | | GB_BA2: BFU78108 | 1900 | U78108 | Bacteroides fragilis NAD(H) glutamate dehydrogenase (gdhB) gene, complete cds. | Bacteroides fragilis | 40,509 | 15-Jul-98 |
| rxa01301 | 648 | GB_PR4: AC007051 | 167810 | AC007051 | Homo sapiens chromosome 3, clone hRPK.44_A_1, complete sequence. | Homo sapiens | 38,498 | 11-Jun-99 |
| | | GB_PR4: AC007919 | 184989 | AC007919 | Homo sapiens 3q26.2-27 BAC RPCI11-408H1 (Roswell Park Cancer Institute Human | Homo sapiens | 35,139 | 09-OCT-1999 |
| | | | | | BAC Library) complete sequence. | | | |
| | | GB_EST11: AA252547 | 454 | AA252547 | zp87g09.r1 Stratagene HeLa cell s3 937216 Homo sapiens cDNA clone IMAGE: | Homo sapiens | 38,538 | 12-MAR-1997 |
| | | | | | 627232 5′ similar to gb: D13748 EUKARYOTIC INITIATION | | | |
| | | | | | FACTOR 4A-I (HUMAN);, mRNA sequence. | | | |
| rxa01304 | 609 | GB_HTG2: AC006779 | 119562 | AC006779 | Caenorhabditis elegans clone Y47D7, *** SEQUENCING | Caenorhabditis elegans | 32,888 | 25-Feb-99 |
| | | | | | IN PROGRESS ***, 32 unordered pieces. | | | |
| | | GB_HTG2: AC006779 | 119562 | AC006779 | Caenorhabditis elegans clone Y47D7, *** SEQUENCING | Caenorhabditis elegans | 32,888 | 25-Feb-99 |
| | | | | | IN PROGRESS ***, 32 unordered pieces. | | | |
| | | GB_VI: BHT1UL | 37000 | Z78205 | Bovine herpesvirus type 1 UL22-35 genes. | Bovine herpesvirus 1 | 38,047 | 14-Aug-96 |
| rxa01306 | 1131 | GB_GSS8: AQ047475 | 420 | AQ047475 | cLM-1c5-t cLM Giardia intestinalis genomic, genomic survey sequence. | Giardia intestinalis | 38,902 | 14-Jul-98 |
| | | GB_PL1: CR1433P | 1464 | X79445 | C. reinhardtii mRNA for 14-3-3 protein. | Chlamydomonas reinhardtii | 39,640 | 06-OCT-1995 |
| | | GB_PR3: HSJ878I13 | 122400 | AL049591 | Human DNA sequence from clone 878I13 on chromosome Xq23-25 | Homo sapiens | 35,624 | 23-Nov-99 |
| | | | | | Contains a pseudogene similar to alpha tubulin, ESTs, STSs, | | | |
| | | | | | GSSs, complete sequence. | | | |
| rxa01310 | 450 | GB_HTG3: AC010530 | 274508 | AC010530 | Homo sapiens chromosome 16 clone RPCI-11_167P11, *** SEQUENCING | Homo sapiens | 38,462 | 15-Sep-99 |
| | | | | | IN PROGRESS ***, 19 unordered pieces. | | | |
| | | GB_HTG3: AC010530 | 274508 | AC010530 | Homo sapiens chromosome 16 clone RPCI-11_167P11, *** SEQUENCING | Homo sapiens | 38,462 | 15-Sep-99 |
| | | | | | IN PROGRESS ***, 19 unordered pieces. | | | |
| | | GB_HTG3: AC010530 | 274508 | AC010530 | Homo sapiens chromosome 16 clone RPCI-11_167P11, *** SEQUENCING | Homo sapiens | 32,063 | 15-Sep-99 |
| | | | | | IN PROGRESS ***, 19 unordered pieces. | | | |
| rxa01313 | | | | | | | | |
| rxa01315 | 774 | GB_BA2: AF031037 | 1472 | AF031037 | Neisseria meningitidis chloramphenicol acetyltransferase gene, complete cds. | Neisseria meningitidis | 35,638 | 21-Apr-98 |
| | | GB_GSS11: AQ326599 | 662 | AQ326599 | nbxb0037P01r CUGI Rice BAC Library Oryza sativa genomic clone | Oryza sativa | 34,817 | 8-Jan-99 |
| | | | | | nbxb0037P01r, genomic survey sequence. | | | |
| | | GB_HTG1: PFMAL13PA | 80518 | AL109815 | Plasmodium falciparum chromosome 13 strain 3D7, *** SEQUENCING | Plasmodium falciparum | 34,935 | 19-Aug-99 |
| | | | | | IN PROGRESS ***, in unordered pieces. | | | |
| rxa01316 | 426 | GB_HTG3: AC010133 | 154773 | AC010133 | Homo sapiens clone NH0118E09, *** SEQUENCING | Homo sapiens | 33,414 | 13-Sep-99 |
| | | | | | IN PROGRESS ***, 5 unordered pieces. | | | |
| | | GB_HTG3: AC010133 | 154773 | AC010133 | Homo sapiens clone NH0118E09, *** SEQUENCING | Homo sapiens | 33,414 | 13-Sep-99 |
| | | | | | IN PROGRESS ***, 5 unordered pieces. | | | |
| | | GB_HTG3: AC010133 | 154773 | AC010133 | Homo sapiens clone NH0118E09, *** SEQUENCING | Homo sapiens | 38,186 | 13-Sep-99 |
| | | | | | IN PROGRESS ***, 5 unordered pieces. | | | |
| rxa01317 | 543 | GB_BA2: U67560 | 12215 | U67560 | Methanococcus jannaschii section 102 of 150 of the complete genome. | Methanococcus jannaschii | 38,476 | 28-Jan-98 |
| | | GB_BA2: U67560 | 12215 | U67560 | Methanococcus jannaschii section 102 of 150 of the complete genome. | Methanococcus jannaschii | 35,867 | 28-Jan-98 |
| rxa01318 | 1425 | GB_BA1: MTV038 | 16094 | AL021933 | Mycobacterium tuberculosis H37Rv complete genome; segment 24/162. | Mycobacterium | 51,266 | 17-Jun-98 |
| | | | | | | tuberculosis | | |
| | | GB_IN1: CELC41A3 | 37149 | U41541 | Caenorhabditis elegans cosmid C41A3. | Caenorhabditis elegans | 36,887 | 08-DEC-1995 |
| | | GB_HTG3: AC011298 | 205637 | AC011298 | Homo sapiens clone NH0118M12, *** SEQUENCING | Homo sapiens | 35,760 | 05-OCT-1999 |
| | | | | | IN PROGRESS ***, 19 unordered pieces. | | | |
| rxa01326 | 489 | GB_BA1: PAL249201 | 3390 | AJ249201 | Prevotella albensis ftsQ (partial), ftsA and ftsZ genes and ORF-fts (partial). | Prevotella albensis | 37,708 | 27-Aug-99 |
| | | GB_BA1: PAL249201 | 3390 | AJ249201 | Prevotella albensis ftsQ (partial), ftsA and ftsZ genes and ORF-fts (partial). | Prevotella albensis | 37,474 | 27-Aug-99 |
| rxa01330 | | | | | | | | |
| rxa01331 | 2520 | GB_HTG1: HSAJ02553 | 142807 | AJ002553 | Homo sapiens chromosome 11 clone 1118i22 map q13, *** SEQUENCING | Homo sapiens | 26,237 | 14-Nov-97 |
| | | | | | IN PROGRESS ***, in unordered pieces. | | | |
| | | GB_HTG1: HSAJ02553 | 142807 | AJ002553 | Homo sapiens chromosome 11 clone 1118i22 map q13, *** SEQUENCING | Homo sapiens | 26,237 | 14-Nov-97 |
| | | | | | IN PROGRESS ***, in unordered pieces. | | | |
| | | GB_PR3: AC005304 | 164017 | AC005304 | Homo sapiens chromosome 17, clone hRPK.131_K_5, | Homo sapiens | 35,318 | 25-Jul-98 |
| | | | | | complete sequence. | | | |
| rxa01333 | 1128 | GB_BA1: CGU43536 | 3464 | U43536 | Corynebacterium glutamicum heat shock, ATP-binding protein | Corynebacterium | 38,075 | 13-MAR-1997 |
| | | | | | (clpB) gene, complete cds. | glutamicum | | |
| | | GB_OM: BTPRLP | 924 | X15975 | Bovine mRNA for prolactin (PRL) related protein. | Bos taurus | 40,901 | 22-DEC-1994 |
| | | GB_OM: BTPRLP | 924 | X15975 | Bovine mRNA for prolactin (PRL) related protein. | Bos taurus | 39,580 | 22-DEC-1994 |
| rxa01336 | 726 | GB_BA1: AP000064 | 247695 | AP000064 | Aeropyrum pernix genomic DNA, section 7/7. | Aeropyrum pernix | 37,881 | 22-Jun-99 |
| | | GB_BA1: AP000064 | 247695 | AP000064 | Aeropyrum pernix genomic DNA, section 7/7. | Aeropyrum pernix | 36,161 | 22-Jun-99 |
| | | GB_EST1: T05458 | 363 | T05458 | EST03347 Fetal brain, Stratagene (cat#936206) Homo sapiens cDNA | Homo sapiens | 43,798 | 30-Jun-93 |
| | | | | | clone HFBCY86, mRNA sequence. | | | |
| rxa01337 | 1536 | GB_PR2: AP000215 | 100000 | AP000215 | Homo sapiens genomic DNA, chromosome 21q22.3-ter, Ter region, | Homo sapiens | 36,438 | 20-Nov-99 |
| | | | | | clone f27E1-T1136, segment 1/4, complete sequence. | | | |
| | | GB_PR2: AP000215 | 100000 | AP000215 | Homo sapiens genomic DNA, chromosome 21q22.3-ter, Ter region, | Homo sapiens | 35,827 | 20-Nov-99 |
| | | | | | clone f27E1-T1136, segment 1/4, complete sequence. | | | |
| | | GB_PR2: AP000337 | 53553 | AP000337 | Homo sapiens genomic DNA, chromosome 21q22.3-ter, Ter region, | Homo sapiens | 36,043 | 20-Nov-99 |
| | | | | | clone: T1957, complete sequence. | | | |
| rxa01342 | 626 | GB_EST35: AI814229 | 544 | AI814229 | wj70e01.x1 NCI_CGAP_Lu19 Homo sapiens cDNA clone IMAGE: | Homo sapiens | 36,803 | 24-Aug-99 |
| | | | | | 2408184 3′, mRNA sequence. | | | |
| | | GB_EST35: AI814229 | 544 | AI814229 | wj70e01.x1 NCI_CGAP_Lu19 Homo sapiens cDNA clone IMAGE: | Homo sapiens | 36,688 | 24-Aug-99 |
| | | | | | 2408184 3′, mRNA sequence. | | | |
| rxa01348 | 615 | GB_HTG3: AC011246 | 210407 | AC011246 | Homo sapiens clone NH0498O20, *** SEQUENCING | Homo sapiens | 39,101 | 04-OCT-1999 |
| | | | | | IN PROGRESS ***, 29 unordered pieces. | | | |
| | | GB_HTG3: AC011246 | 210407 | AC011246 | Homo sapiens clone NH0498O20, *** SEQUENCING | Homo sapiens | 39,101 | 04-OCT-1999 |
| | | | | | IN PROGRESS ***, 29 unordered pieces. | | | |
| | | GB_PL1: ZMB32120 | 3093 | X54212 | Z. mays mRNA for b-32 protein, putative regulatory factor of zein | Zea mays | 35,902 | 18-Jan-93 |
| | | | | | expression (clone b-32.120). | | | |
| rxa01349 | 900 | GB_IN1: CELK10G6 | 33588 | AF016669 | Caenorhabditis elegans cosmid K10G6. | Caenorhabditis elegans | 40,251 | 8-Aug-97 |
| | | GB_IN1: CELK10G6 | 33588 | AF016669 | Caenorhabditis elegans cosmid K10G6. | Caenorhabditis elegans | 36,842 | 8-Aug-97 |
| rxa01357 | 426 | GB_BA1: MTCY274 | 39991 | Z74024 | Mycobacterium tuberculosis H37Rv complete genome; segment 126/162. | Mycobacterium | 36,058 | 19-Jun-98 |
| | | | | | | tuberculosis | | |
| | | GB_BA1: MLCB250 | 40603 | Z97369 | Mycobacterium leprae cosmid B250. | Mycobacterium leprae | 59,294 | 27-Aug-99 |
| | | GB_BA2: SKZ86111 | 7860 | Z86111 | Streptomyces lividans rpsP, trmD, rplS, sipW, sipX, sipY, sipZ, mutT genes | Streptomyces lividans | 57,882 | 27-OCT-1999 |
| | | | | | and 4 open reading frames. | | | |
| rxa01359 | 1305 | GB_BA1: D87820 | 7217 | D87820 | Vibrio cholerae non-O1 gene for N-acetylglucosamine 6-phosphate | Vibrio cholerae non-O1 | 38,152 | 17-OCT-1997 |
| | | | | | deacetylase, NagC, NagE, complete cds. | | | |
| | | GB_PR3: AC004540 | 131757 | AC004540 | Homo sapiens PAC clone DJ1066K24 from 7p15, complete sequence. | Homo sapiens | 35,714 | 9-Apr-98 |
| | | GB_PR2: HSU44119 | 450 | U44119 | Human der(9) chromosome breakpoint region: alpha 1 (V) collagen | Homo sapiens | 38,085 | 14-Jan-97 |
| | | | | | chain (COL5A1) gene, partial intron 24, and imperfect LINE-1 element of Xp21.2. | | | |
| rxa01362 | 3677 | GB_EST30: AI665031 | 602 | AI665031 | 605005H05.x1 605 - Endosperm cDNA library from Schmidt lab | Zea mays | 42,308 | 11-MAY-1999 |
| | | | | | Zea mays cDNA, mRNA sequence. | | | |
| | | GB_EST34: AI795319 | 661 | AI795319 | 605005H05.y2 605 - Endosperm cDNA library from Schmidt lab | Zea mays | 38,729 | 2-Jul-99 |
| | | | | | Zea mays cDNA, mRNA sequence. | | | |
| | | GB_HTG3: AC008387 | 151804 | AC008387 | Homo sapiens chromosome 5 clone CIT-HSPC_229P9, | Homo sapiens | 38,023 | 3-Aug-99 |
| | | | | | *** SEQUENCING IN PROGRESS ***, 74 unordered pieces. | | | |
| rxa01366 | 513 | GB_IN1: AF007166 | 1392 | AF007166 | Anopheles gambiae serine | Anopheles gambiae | 41,379 | 14-Jul-97 |
| | | | | | protease 14D mRNA, complete cds. | | | |
| | | GB_GSS13: AQ475498 | 476 | AQ475498 | CITBI-E1-2589F13.TR CITBI-E1 Homo sapiens genomic | Homo sapiens | 40,511 | 23-Apr-99 |
| | | | | | clone 2589F13, genomic survey sequence. | | | |
| | | GB_IN1: AF007166 | 1392 | AF007166 | Anopheles gambiae serine protease 14D mRNA, complete cds. | Anopheles gambiae | 40,000 | 14-Jul-97 |
| rxa01367 | 525 | GB_EST28: AI489958 | 591 | AI489958 | EST248297 tomato ovary, TAMU Lycopersicon esculentum | Lycopersicon esculentum | 38,186 | 29-Jun-99 |
| | | | | | cDNA clone cLED14O8, mRNA sequence. | | | |
| | | GB_GSS13: AQ475498 | 476 | AQ475498 | CITBI-E1-2589F13.TR CITBI-E1 Homo sapiens genomic clone | Homo sapiens | 37,405 | 23-Apr-99 |
| | | | | | 2589F13, genomic survey sequence. | | | |
| | | GB_EST28: AI489958 | 591 | AI489958 | EST248297 tomato ovary, TAMU Lycopersicon esculentum | Lycopersicon esculentum | 35,882 | 29-Jun-99 |
| | | | | | cDNA clone cLED14O8, mRNA sequence. | | | |
| rxa01370 | | | | | | | | |
| rxa01372 | 614 | GB_HTG5: AC011644 | 164746 | AC011644 | Homo sapiens clone 14_K_21, *** SEQUENCING | Homo sapiens | 33,715 | 5-Nov-99 |
| | | | | | IN PROGRESS ***, 8 unordered pieces. | | | |
| | | GB_HTG5: AC011644 | 164746 | AC011644 | Homo sapiens clone 14_K_21, *** SEQUENCING | Homo sapiens | 35,821 | 5-Nov-99 |
| | | | | | IN PROGRESS ***, 8 unordered pieces. | | | |
| rxa01378 | 1878 | GB_IN1: DMBR42I17 | 155168 | AL121806 | Drosophila melanogaster clone BACR42I17. | Drosophila melanogaster | 36,373 | 10-OCT-1999 |
| | | GB_IN2: AC005714 | 177740 | AC005714 | Drosophila melanogaster, chromosome 2R, region 58D4-58E2, | Drosophila melanogaster | 36,234 | 01-MAY-1999 |
| | | | | | BAC clone BACR48M13, complete sequence. | | | |
| | | GB_IN2: AC005639 | 188288 | AC005639 | Drosophila melanogaster, chromosome 2R, region 59E3-59F4, | Drosophila melanogaster | 36,275 | 6-Jan-99 |
| | | | | | BAC clone BACR48M01, complete sequence. | | | |
| rxa01379 | 1042 | GB_HTG4: AC010031 | 132106 | AC010031 | Drosophila melanogaster chromosome 3L/70C1 clone RPCI98-2M20, | Drosophila melanogaster | 35,368 | 16-OCT-1999 |
| | | | | | *** SEQUENCING IN PROGRESS ***, 69 unordered pieces. | | | |
| | | GB_HTG4: AC010031 | 132106 | AC010031 | Drosophila melanogaster chromosome 3L/70C1 clone RPCI98-2M20, | Drosophila melanogaster | 35,368 | 16-OCT-1999 |
| | | | | | *** SEQUENCING IN PROGRESS ***, 69 unordered pieces. | | | |
| | | GB_HTG3: AC009932 | 68745 | AC009932 | Homo sapiens clone 114_O_12, LOW-PASS SEQUENCE SAMPLING. | Homo sapiens | 36,337 | 05-OCT-1999 |
| rxa01380 | 2322 | GB_BA1: SC5F2A | 40105 | AL049587 | Streptomyces coelicolor cosmid 5F2A. | Streptomyces coelicolor | 39,699 | 24-MAY-1999 |
| | | GB_BA1: BPTEX | 2701 | X95386 | B. pertussis tex gene. | Bordetella pertussis | 59,687 | 31-Jul-96 |
| | | GB_BA1: SC5F2A | 40105 | AL049587 | Streptomyces coelicolor cosmid 5F2A. | Streptomyces coelicolor | 41,024 | 24-MAY-1999 |
| rxa01384 | 1839 | GB_GSS15: AQ613816 | 598 | AQ613816 | HS_5118_B1_F06_T7A RPCI-11 Human Male BAC Library Homo sapiens | Homo sapiens | 39,300 | 15-Jun-99 |
| | | | | | genomic clone Plate = 694 Col = 11 Row = L, genomic survey sequence. | | | |
| | | GB_GSS15: AQ613816 | 598 | AQ613816 | HS_5118_B1_F06_T7A RPCI-11 Human Male BAC Library Homo sapiens | Homo sapiens | 36,455 | 15-Jun-99 |
| | | | | | genomic clone Plate = 694 Col = 11 Row = L, genomic survey sequence. | | | |
| rxa01390 | 780 | GB_BA2: CGL012293 | 2952 | AJ012293 | Corynebacterium glutamicum ilvD gene. | Corynebacterium | 40,413 | 01-OCT-1999 |
| | | | | | | glutamicum | | |
| | | GB_PR4: AC006213 | 160754 | AC006213 | Homo sapiens, clone hRPK.15_A_1, complete sequence. | Homo sapiens | 35,724 | 16-Jan-99 |
| | | GB_PL2: ATF24G24 | 99856 | AL049488 | Arabidopsis thaliana DNA chromosome 4, BAC clone F24G24 (ESSA project). | Arabidopsis thaliana | 35,925 | 27-Aug-99 |
| rxa01391 | 813 | GB_HTG2: AC006171 | 44733 | AC006171 | Homo sapiens chromosome 10 clone LA10NC01_15_E_11 map 10q26.3, | Homo sapiens | 35,031 | 09-DEC-1998 |
| | | | | | *** SEQUENCING IN PROGRESS ***, 3 unordered pieces. | | | |
| | | GB_HTG2: AC006171 | 44733 | AC006171 | Homo sapiens chromosome 10 clone LA10NC01_15_E_11 map 10q26.3, | Homo sapiens | 35,031 | 09-DEC-1998 |
| | | | | | *** SEQUENCING IN PROGRESS ***, 3 unordered pieces. | | | |
| | | GB_HTG2: AC006171 | 44733 | AC006171 | Homo sapiens chromosome 10 clone LA10NC01_15_E_11 map 10q26.3, | Homo sapiens | 38,035 | 09-DEC-1998 |
| | | | | | *** SEQUENCING IN PROGRESS ***, 3 unordered pieces. | | | |
| rxa01396 | 381 | GB_BA2: AE000775 | 14358 | AE000775 | Aquifex aeolicus section 107 of 109 of the complete genome. | Aquifex aeolicus | 43,085 | 25-MAR-1998 |
| | | GB_EST26: AI329024 | 471 | AI329024 | a9c02ne.f1 Neurospora crassa evening cDNA library Neurospora crassa | Neurospora crassa | 39,286 | 28-DEC-1998 |
| | | | | | cDNA clone a9c02ne 5′, mRNA sequence. | | | |
| | | GB_EST26: AI329043 | 401 | AI329043 | a9d06ne.f1 Neurospora crassa evening cDNA library Neurospora crassa | Neurospora crassa | 44,484 | 28-DEC-1998 |
| | | | | | cDNA clone a9d06ne 5′, mRNA sequence. | | | |
| rxa01397 | 543 | GB_BA2: AE000775 | 14358 | AE000775 | Aquifex aeolicus section 107 of 109 of the complete genome. | Aquifex aeolicus | 41,121 | 25-MAR-1998 |
| | | GB_BA1: BSTMSPRS | 3211 | X16518 | B. subtilis prs, tms, and ctc (partial) genes for PRPP synthetase and | Bacillus subtilis | 41,255 | 30-Sep-93 |
| | | | | | two undefined gene products. | | | |
| | | GB_EST4: H21691 | 382 | H21691 | yl29b01.r1 Soares breast 3NbHBst Homo sapiens cDNA clone | Homo sapiens | 35,407 | 6-Jul-95 |
| | | | | | IMAGE: 159625 5′ similar to SP: XPEC_CERAE P33194 POSSIBLE DNA-REPAIR | | | |
| | | | | | PROTEIN XP-E;, mRNA sequence. | | | |
| rxa01400 | 1623 | GB_GSS11: AQ264714 | 353 | AQ264714 | CITBI-E1-2502C17.TR CITBI-E1 Homo sapiens genomic | Homo sapiens | 40,227 | 27-OCT-1998 |
| | | | | | clone 2502C17, genomic survey sequence. | | | |
| | | GB_BA1: TFENTRA | 2803 | M58480 | Thiobacillus ferrooxidans nitrogen metabolism regulator (ntrA) gene, complete cds. | Thiobacillus ferrooxidans | 39,960 | 26-Apr-93 |
| | | GB_BA1: NPSDHCDBA | 5596 | Y07709 | N. pharaonis sdhC, sdhD, sdhB and sdhA genes. | Natronomonas pharaonis | 38,003 | 2-Sep-96 |
| rxa01401 | 384 | GB_HTG4: AC006583 | 110000 | AC006583 | Homo sapiens chromosome 3p21.3 clone RPCI11-491D6, | Homo sapiens | 32,718 | 21-OCT-1999 |
| | | | | | *** SEQUENCING IN PROGRESS ***, 90 unordered pieces. | | | |
| | | GB_HTG4: AC006583 | 110000 | AC006583 | Homo sapiens chromosome 3p21.3 clone RPCI11-491D6, | Homo sapiens | 32,718 | 21-OCT-1999 |
| | | | | | *** SEQUENCING IN PROGRESS ***, 90 unordered pieces. | | | |
| | | GB_HTG4: AC011291 | 173585 | AC011291 | Homo sapiens chromosome unknown clone NH0067G07, | Homo sapiens | 33,596 | 29-OCT-1999 |
| | | | | | WORKING DRAFT SEQUENCE, in unordered pieces. | | | |
| rxa01402 | 597 | GB_BA1: CAJ10319 | 5368 | AJ010319 | Corynebacterium glutamicum amtP, glnB, glnD genes and | Corynebacterium | 39,389 | 14-MAY-1999 |
| | | | | | partial ftsY and srp genes. | glutamicum | | |
| | | GB_HTG4: AC010066 | 187240 | AC010066 | Drosophila melanogaster chromosome 3L/72A4 clone RPCI98-25O1, | Drosophila melanogaster | 33,681 | 16-OCT-1999 |
| | | | | | *** SEQUENCING IN PROGRESS ***, 70 unordered pieces. | | | |
| | | GB_HTG4: AC010066 | 187240 | AC010066 | Drosophila melanogaster chromosome 3L/72A4 clone RPCI98-25O1, | Drosophila melanogaster | 33,681 | 16-OCT-1999 |
| | | | | | *** SEQUENCING IN PROGRESS ***, 70 unordered pieces. | | | |
| rxa01403 | 771 | GB_BA1: SC6E10 | 23990 | AL109661 | Streptomyces coelicolor cosmid 6E10. | Streptomyces coelicolor | 39,136 | 5-Aug-99 |
| | | | | | | A3(2) | | |
| | | GB_GSS12: AQ396728 | 608 | AQ396728 | mgxb0002E02f CUGI Rice Blast BAC Library Magnaporthe grisea | Magnaporthe grisea | 36,626 | 06-MAR-1999 |
| | | | | | genomic clone mgxb0002E02f, genomic survey sequence. | | | |
| | | GB_BA1: SC6E10 | 23990 | AL109661 | Streptomyces coelicolor cosmid 6E10. | Streptomyces coelicolor | 41,403 | 5-Aug-99 |
| | | | | | | A3(2) | | |
| rxa01405 | 579 | GB_PL2: AF111709 | 52684 | AF111709 | Oryza sativa subsp. indica Retrosat 1 retrotransposon and Ty3-Gypsy type Retrosat 2 | Oryza sativa subsp. indica | 34,888 | 26-Apr-99 |
| | | | | | retrotransposon, complete sequences; and unknown genes. | | | |
| | | GB_GSS3: B88760 | 696 | B88760 | RPCI11-24L19.TPC RPCI-11 Homo sapiens genomic clone | Homo sapiens | 37,204 | 9-Apr-99 |
| | | | | | RPCI-11-24L19, genomic survey sequence. | | | |
| | | GB_STS: G52436 | 696 | G52436 | SHGC-85004 Human Homo sapiens STS genomic, sequence tagged site. | Homo sapiens | 37,204 | 25-Jun-99 |
| rxa01409 | 845 | GB_HTG5: AC008019 | 190459 | AC008019 | Mus musculus, *** SEQUENCING IN PROGRESS ***, 16 unordered pieces. | Mus musculus | 39,924 | 16-Nov-99 |
| | | GB_PR4: AC006236 | 127593 | AC006236 | Homo sapiens chromosome 17, clone hCIT.162_E_12, complete sequence. | Homo sapiens | 33,907 | 29-DEC-1998 |
| | | GB_HTG5: AC008019 | 190459 | AC008019 | Mus musculus, *** SEQUENCING IN PROGRESS ***, 16 unordered pieces. | Mus musculus | 40,819 | 16-Nov-99 |
| rxa01413 | 723 | GB_OV: AF038947 | 1617 | AF038947 | Ambystoma tigrinum red cone visual pigment mRNA, complete cds. | Ambystoma tigrinum | 35,846 | 16-DEC-1998 |
| | | GB BA1: MSGB577COS | 37770 | L01263 | M. leprae genomic dna sequence, cosmid b577. | Mycobacterium leprae | 38,042 | 14-Jun-96 |
| | | GB_PR3: AC002558 | 102064 | AC002558 | Homo sapiens chromosome 17, clone hRPC867C24, complete sequence. | Homo sapiens | 36,820 | 31-OCT-1997 |
| rxa01414 | 630 | GB_PL1: SC5610 | 37730 | Z38060 | S. cerevisiae chromosome IX sequence derived from lambda clones 5610-5004. | Saccharomyces cerevisiae | 38,782 | 20-Aug-97 |
| | | GB_PL1: YSCDIN1 | 2969 | M58012 | S. cerevisiae ribonucleotide reductase DNA damage-inducible regulatory subunit | Saccharomyces cerevisiae | 35,877 | 27-Apr-93 |
| | | | | | (DIN1) gene, 5′ end. | | | |
| | | GB_EST18: AA689161 | 624 | AA689161 | ET2100 Trypanosoma brucei rhodesiense ZAP II library Trypanosoma brucei | Trypanosoma brucei | 37,150 | 15-DEC-1997 |
| | | | | | rhodesiense cDNA 5′, mRNA sequence. | rhodesiense | | |
| rxa01417 | 720 | GB_PL1: SC8419 | 30507 | Z49701 | S. cerevisiae chromosome IV cosmid 8419. | Saccharomyces cerevisiae | 36,248 | 11-Aug-97 |
| | | GB_PL1: SCPRP28G | 2452 | X56934 | S. cerevisiae PRP28 gene. | Saccharomyces cerevisiae | 45,036 | 9-Feb-95 |
| | | GB_BA1: BACPEPFA | 4654 | M29035 | B. subtilis bacillopeptidase F (bpr) gene, complete cds. | Bacillus subtilis | 37,324 | 06-MAR-1995 |
| rxa01421 | | | | | | | | |
| rxa01422 | 1095 | GB_EST24: AU033392 | 344 | AU033392 | AU033392 Dictyostelium discoideum SL (H. Urushihara) Dictyostelium | Dictyostelium discoideum | 38,953 | 28-Apr-99 |
| | | | | | discoideum cDNA clone SLA715, mRNA sequence. | | | |
| | | GB_EST14: AA399243 | 301 | AA399243 | zt57d02.s1 Soares_testis_NHT Homo sapiens cDNA clone | Homo sapiens | 45,183 | 12-Aug-97 |
| | | | | | IMAGE: 726435 3′ similar to SW: NIDO_HUMAN P14543 | | | |
| | | | | | NIDOGEN PRECURSOR;, mRNA sequence. | | | |
| | | GB_PR2: AC002037 | 53897 | AC002037 | Human Chromosome 11 Overlapping Cosmids cSRL72g7 and | Homo sapiens | 37,500 | 6-Aug-97 |
| | | | | | cSRL140b8, complete sequence. | | | |
| rxa01425 | 1008 | GB_PR4: AC005908 | 196501 | AC005908 | Homo sapiens 12p13.3 BAC RPCI11-476M19 (Roswell Park Cancer | Homo sapiens | 34,410 | 20-Jan-99 |
| | | | | | Institute Human BAC Library) complete sequence. | | | |
| | | GB_PR4: AF111169 | 183916 | AF111169 | Homo sapiens chromosome 14 BAC containing gene for KIAA0759 and | Homo sapiens | 40,635 | 19-Jul-99 |
| | | | | | other possible new transcripts, complete sequence. | | | |
| | | GB_HTG2: AC008284 | 146797 | AC008284 | Drosophila melanogaster chromosome 3 clone BACR03M22 (D1000) | Drosophila melanogaster | 35,822 | 2-Aug-99 |
| | | | | | RPCI-98 03.M.22 map 96C-96D strain y; cn bw sp, *** SEQUENCING IN | | | |
| | | | | | PROGRESS ***, 137 unordered pieces. | | | |
| rxa01429 | 741 | GB_EST25: AI300084 | 635 | AI300084 | qn59f02.x1 NCI_CGAP_Kid5 Homo sapiens cDNA clone | Homo sapiens | 37,753 | 1-Feb-99 |
| | | | | | IMAGE: 1902555 3′, mRNA sequence. | | | |
| | | GB_EST18: AA706612 | 949 | AA706612 | ah26c02.s1 Soares_parathyroid_tumor_NbHPA Homo sapiens cDNA | Homo sapiens | 37,361 | 12-Jan-99 |
| | | | | | clone 1239938 3′, mRNA sequence. | | | |
| | | GB_EST35: AI817084 | 598 | AI817084 | wj76g07.x1 NCI_CGAP_Lu19 Homo sapiens cDNA clone | Homo sapiens | 38,627 | 24-Aug-99 |
| | | | | | IMAGE: 2408796 3′, mRNA sequence. | | | |
| rxa01434 | 3075 | GB_PL1: CAC49C10 | 37825 | AL033497 | C. albicans cosmid Ca49C10. | Candida albicans | 34,724 | 10-Nov-98 |
| | | GB_GSS3: B10423 | 1217 | B10423 | F19F22-T7 IGF Arabidopsis thaliana genomic clone F19F22, | Arabidopsis thaliana | 36,003 | 14-MAY-1997 |
| | | | | | genomic survey sequence. | | | |
| | | GB_PL1: CAC49C10 | 37825 | AL033497 | C. albicans cosmid Ca49C10. | Candida albicans | 33,794 | 10-Nov-98 |
| rxa01439 | 669 | GB_BA2: AF049897 | 9196 | AF049897 | Corynebacterium glutamicum N-acetylglutamylphosphate reductase (argC), ornithine | Corynebacterium | 41,564 | 1-Jul-98 |
| | | | | | acetyltransferase (argJ), N-acetylglutamate kinase (argB), acetylornithine | glutamicum | | |
| | | | | | transaminase (argD), ornithine carbamoyltransferase (argF), arginine repressor (argR), | | | |
| | | | | | argininosuccinate synthase (argG), and argininosuccinate lyase (argH) | | | |
| | | | | | genes, complete cds. | | | |
| | | GB_BA1: CGARGCJBD | 4355 | X86157 | C. glutamicum argC, argJ, argB, argD, and argF genes. | Corynebacterium | 41,564 | 25-Jul-96 |
| | | | | | | glutamicum | | |
| | | GB_BA2: AF049897 | 9196 | AF049897 | Corynebacterium glutamicum N-acetylglutamylphosphate reductase (argC), ornithine | Corynebacterium | 39,486 | 1-Jul-98 |
| | | | | | acetyltransferase (argJ), N-acetylglutamate kinase (argB), acetylornithine | glutamicum | | |
| | | | | | transaminase (argD), ornithine carbamoyltransferase (argF), arginine | | | |
| | | | | | repressor (argR), argininosuccinate synthase (argG), | | | |
| | | | | | and argininosuccinate lyase (argH) genes, complete cds. | | | |
| rxa01440 | 1131 | GB_PAT: E16763 | 2517 | E16763 | gDNA encoding aspartate transferase (AAT). | Corynebacterium | 42,188 | 28-Jul-99 |
| | | | | | | glutamicum | | |
| | | GB_EST20: AA870569 | 423 | AA870569 | vq23c09.r1 Barstead stromal cell line MPLRB8 Mus musculus cDNA clone | Mus musculus | 42,066 | 16-MAR-1998 |
| | | | | | IMAGE: 1095088 5′ similar to TR: Q14468 Q14468 KIAA0047;, mRNA sequence. | | | |
| | | GB_EST18: AA726390 | 436 | AA726390 | vu40b04.r1 Barstead mouse myotubes MPLRB5 Mus musculus cDNA clone | Mus musculus | 41,228 | 2-Jan-98 |
| | | | | | IMAGE: 1193839 5′, mRNA sequence. | | | |
| rxa01441 | 1152 | GB_EST32: AV053763 | 252 | AV053763 | AV053763 Mus musculus pancreas C57BL/6J adult Mus musculus cDNA | Mus musculus | 45,238 | 23-Jun-99 |
| | | | | | clone 1810028E06, mRNA sequence. | | | |
| | | GB_EST20: AA870569 | 423 | AA870569 | vq23c09.r1 Barstead stromal cell line MPLRB8 Mus musculus cDNA clone | Mus musculus | 39,643 | 16-MAR-1998 |
| | | | | | IMAGE: 1095088 5′ similar to TR: Q14468 Q14468 KIAA0047;, mRNA sequence. | | | |
| | | GB_EST18: AA726390 | 436 | AA726390 | vu40b04.r1 Barstead mouse myotubes MPLRB5 Mus musculus cDNA clone | Mus musculus | 39,953 | 2-Jan-98 |
| | | | | | IMAGE: 1193839 5′, mRNA sequence. | | | |
| rxa01445 | 1116 | GB_PR4: AC007786 | 229061 | AC007786 | Homo sapiens chromosome 19, BAC 41855 (CIT-B-32o4), complete sequence. | Homo sapiens | 39,545 | 11-Jun-99 |
| | | GB_PR3: AC003957 | 126581 | AC003957 | Homo sapiens chromosome 17, clone hCIT.457_L_16, complete sequence. | Homo sapiens | 36,579 | 09-MAY-1998 |
| | | GB_OV: AF108420 | 46626 | AF108420 | Fugu rubripes prohormone convertase PACE4 (PACE4) gene, partial cds; and | Fugu rubripes | 39,187 | 17-MAR-1999 |
| | | | | | 1-aminocyclopropane-carboxilate synthase (ACC), recombination-activating protein | | | |
| | | | | | 1 (RAG1), and recombination-activating protein 2 (RAG2) genes, complete cds. | | | |
| rxa01447 | 972 | GB_PL2: AF049112 | 1436 | AF049112 | Zea mays retrotransposon Cinful prpol mRNA, partial cds. | Zea mays | 38,268 | 1-Feb-99 |
| | | GB_EST36: AV190070 | 360 | AV190070 | AV190070 Yuji Kohara unpublished cDNA: Strain N2 hermaphrodite embryo | Caenorhabditis elegans | 40,390 | 22-Jul-99 |
| | | | | | Caenorhabditis elegans cDNA clone yk566e10 5′, mRNA sequence. | | | |
| | | GB_EST9: AA103228 | 477 | AA103228 | mo22h07.r1 Life Tech mouse embryo 13 5dpc 10666014 Mus musculus cDNA | Mus musculus | 40,411 | 29-OCT-1996 |
| | | | | | clone IMAGE: 554365 5′ similar to gb: J00068 ACTIN, ALPHA | | | |
| | | | | | SKELETAL MUSCLE (HUMAN); | | | |
| | | | | | gb: M12866 Mouse skeletal muscle actin mRNA, complete cds | | | |
| | | | | | (MOUSE);, mRNA sequence. | | | |
| rxa01448 | 1290 | GB_BA1: CGFDA | 3371 | X17313 | Corynebacterium glutamicum fda gene for fructose-bisphosphate | Corynebacterium | 100,000 | 12-Sep-93 |
| | | | | | aldolase (EC 4.1.2.13). | glutamicum | | |
| | | GB_PL2: ENU75428 | 4443 | U75428 | Emericella nidulans acid trehalase precursor (treA) gene, complete cds. | Emericella nidulans | 36,271 | 15-MAY-1997 |
| | | GB_BA1: CGFDA | 3371 | X17313 | Corynebacterium glutamicum fda gene for fructose-bisphosphate | Corynebacterium | 37,872 | 12-Sep-93 |
| | | | | | aldolase (EC 4.1.2.13). | glutamicum | | |
| rxa01452 | 402 | GB_BA1: MTV017 | 67200 | AL021897 | Mycobacterium tuberculosis H37Rv complete genome; segment 48/162. | Mycobacterium | 57,246 | 24-Jun-99 |
| | | | | | | tuberculosis | | |
| | | GB_BA1: MLCB1222 | 34714 | AL049491 | Mycobacterium leprae cosmid B1222. | Mycobacterium leprae | 34,872 | 27-Aug-99 |
| | | GB_BA2: S71532 | 914 | S71532 | che = cholesterol esterase [Streptomyces lavendulae, H646-SY2, Genomic, 914 nt]. | Streptomyces lavendulae | 38,701 | 8-Nov-94 |
| rxa01456 | 645 | GB_GSS3: B16150 | 663 | B16150 | 347A15.TP CIT978SKA1 Homo sapiens genomic clone A-347A15, genomic | Homo sapiens | 34,394 | 4-Jun-98 |
| | | | | | survey sequence. | | | |
| | | GB_HTG3: AC004157 | 132090 | AC004157 | Plasmodium falciparum chromosome 12 clone 3D7, *** SEQUENCING | Plasmodium falciparum | 34,165 | 23-Sep-99 |
| | | | | | IN PROGRESS ***, 9 unordered pieces. | | | |
| | | GB_HTG3: AC004157 | 132090 | AC004157 | Plasmodium falciparum chromosome 12 clone 3D7, *** SEQUENCING | Plasmodium falciparum | 34,165 | 23-Sep-99 |
| | | | | | IN PROGRESS ***, 9 unordered pieces. | | | |
| rxa01457 | 798 | GB_HTG3: AC011009 | 158335 | AC011009 | Homo sapiens clone 2_I_22, LOW-PASS SEQUENCE SAMPLING. | Homo sapiens | 39,490 | 29-Sep-99 |
| | | GB_HTG3: AC011009 | 158335 | AC011009 | Homo sapiens clone 2_I_22, LOW-PASS SEQUENCE SAMPLING. | Homo sapiens | 39,490 | 29-Sep-99 |
| | | GB_HTG3: AC011009 | 158335 | AC011009 | Homo sapiens clone 2_I_22, LOW-PASS SEQUENCE SAMPLING. | Homo sapiens | 39,125 | 29-Sep-99 |
| rxa01459 | 933 | GB_HTG3: AC008670 | 113564 | AC008670 | Homo sapiens chromosome 5 clone CIT978SKB_36O1, *** SEQUENCING | Homo sapiens | 39,022 | 3-Aug-99 |
| | | | | | IN PROGRESS ***, 43 unordered pieces. | | | |
| | | GB_HTG3: AC008670 | 113564 | AC008670 | Homo sapiens chromosome 5 clone CIT978SKB_36O1, *** SEQUENCING | Homo sapiens | 39,022 | 3-Aug-99 |
| | | | | | IN PROGRESS ***, 43 unordered pieces. | | | |
| | | GB_IN2: CELT05A8 | 33896 | AF040652 | Caenorhabditis elegans cosmid T05A8. | Caenorhabditis elegans | 35,699 | 16-Jun-99 |
| rxa01460 | 417 | GB_HTG3: AC009186 | 48600 | AC009186 | Homo sapiens chromosome 5 clone CIT978SKB_148I14, *** SEQUENCING | Homo sapiens | 41,278 | 07-OCT-1999 |
| | | | | | IN PROGRESS ***, 3 ordered pieces. | | | |
| | | GB_HTG3: AC009186 | 48600 | AC009186 | Homo sapiens chromosome 5 clone CIT978SKB_148I14, *** SEQUENCING | Homo sapiens | 41,278 | 07-OCT-1999 |
| | | | | | IN PROGRESS ***, 3 ordered pieces. | | | |
| | | GB_HTG3: AC009186 | 48600 | AC009186 | Homo sapiens chromosome 5 clone CIT978SKB_148I14, *** SEQUENCING | Homo sapiens | 35,162 | 07-OCT-1999 |
| | | | | | IN PROGRESS ***, 3 ordered pieces. | | | |
| rxa01463 | 1287 | GB_PR3: HS326L13 | 127247 | Z82170 | Human DNA sequence from PAC 326L13 containing brain-4 mRNA ESTs and | Homo sapiens | 37,956 | 23-Nov-99 |
| | | | | | polymorphic CA repeat. | | | |
| | | GB_HTG1: HS439A6 | 49379 | AL031723 | Homo sapiens chromosome 16 clone LA16-439A6, *** SEQUENCING | Homo sapiens | 38,035 | 23-Nov-99 |
| | | | | | IN PROGRESS ***, in unordered pieces. | | | |
| | | GB_HTG1: HS439A6 | 49379 | AL031723 | Homo sapiens chromosome 16 clone LA16-439A6, *** SEQUENCING | Homo sapiens | 38,035 | 23-Nov-99 |
| | | | | | IN PROGRESS ***, in unordered pieces. | | | |
| rxa01469 | 1155 | GB_EST31: AI701691 | 349 | AI701691 | we81c04.x1 Soares_NFL_T_GBC_S1 Homo sapiens cDNA clone IMAGE: | Homo sapiens | 39,806 | 3-Jun-99 |
| | | | | | 2347494 3′ similar to gb: L19686_rna1 MACROPHAGE MIGRATION | | | |
| | | | | | INHIBITORY FACTOR (HUMAN);, mRNA sequence. | | | |
| | | GB_EST15: AA480256 | 389 | AA480256 | ne31f04.s1 NCI_CGAP_Co3 Homo sapiens cDNA clone IMAGE: 898975 3′ | Homo sapiens | 42,705 | 14-Aug-97 |
| | | | | | similar to gb: L19686_rna1 MACROPHAGE MIGRATION INHIBITORY | | | |
| | | | | | FACTOR (HUMAN);, mRNA sequence. | | | |
| | | GB_IN2: AF153269 | 1308 | AF153269 | Tetrahymena thermophila dynein heavy chain (DYH10) gene, partial cds. | Tetrahymena thermophila | 32,489 | 10-Jun-99 |
| rxa01470 | 549 | GB_PL2: ATF3L17 | 94319 | AL080283 | Arabidopsis thaliana DNA chromosome 4, BAC clone F3L17 (ESSA project). | Arabidopsis thaliana | 37,615 | 24-Jun-99 |
| | | GB_PL2: ATF3L17 | 94319 | AL080283 | Arabidopsis thaliana DNA chromosome 4, BAC clone F3L17 (ESSA project). | Arabidopsis thaliana | 35,946 | 24-Jun-99 |
| rxa01471 | 930 | GB_EST11: AA233898 | 460 | AA233898 | zr49b12.s1 Soares_NhHMPu_S1 Homo sapiens cDNA clone IMAGE: | Homo sapiens | 40,570 | 6-Aug-97 |
| | | | | | 666719 3′, mRNA sequence. | | | |
| | | GB_EST11: AA234033 | 428 | AA234033 | zr49b12.r1 Soares_NhHMPu_S1 Homo sapiens cDNA clone IMAGE: 666719 | Homo sapiens | 36,277 | 6-Aug-97 |
| | | | | | 5′ similar to contains Alu repetitive element;, mRNA sequence. | | | |
| | | GB_PL2: AF084971 | 1874 | AF084971 | Catharanthus roseus G-box binding protein 1 (GBF1) mRNA, complete cds. | Catharanthus roseus | 36,821 | 7-Jul-99 |
| rxa01472 | | | | | | | | |
| rxa01473 | 888 | GB_PL2: AC002329 | 76170 | AC002329 | DNA sequence of Arabidopsis thaliana BAC F5J6 from chromosome | Arabidopsis thaliana | 35,780 | 18-Nov-97 |
| | | | | | IV, complete sequence. | | | |
| | | GB_HTG3: AC009485 | 190706 | AC009485 | Homo sapiens clone NH0324G03, *** SEQUENCING IN | Homo sapiens | 39,649 | 04-OCT-1999 |
| | | | | | PROGRESS ***, 6 unordered pieces. | | | |
| | | GB_HTG3: AC009485 | 190706 | AC009485 | Homo sapiens clone NH0324G03, *** SEQUENCING IN | Homo sapiens | 39,649 | 04-OCT-1999 |
| | | | | | PROGRESS ***, 6 unordered pieces. | | | |
| rxa01474 | 669 | GB_PR2: HSP373C6 | 85654 | AL022393 | Homo sapiens DNA sequence from P1 p373c6 on chromosome | Homo sapiens | 33,934 | 22-Nov-99 |
| | | | | | 6p21.31-21.33. Contains zinc finger proteins, pseudogenes, ESTs and STS. | | | |
| | | GB_EST4: H30893 | 485 | H30893 | yp43e11.r1 Soares retina N2b5HR Homo sapiens cDNA clone IMAGE: 190220 | Homo sapiens | 37,866 | 16-Aug-95 |
| | | | | | 5′ similar to contains Alu repetitive element;, mRNA sequence. | | | |
| | | GB_PL2: ATAC005398 | 80238 | AC005398 | Arabidopsis thaliana chromosome II BAC T6B13 genomic | Arabidopsis thaliana | 38,640 | 30-OCT-1998 |
| | | | | | sequence, complete sequence. | | | |
| rxa01475 | 549 | GB_PL1: AB024028 | 70952 | AB024028 | Arabidopsis thaliana genomic DNA, chromosome 3, TAC clone: | Arabidopsis thaliana | 40,520 | 20-Nov-99 |
| | | | | | K1G2, complete sequence. | | | |
| | | GB_HTG2: AC007940 | 159279 | AC007940 | Homo sapiens clone 44_C_14, *** SEQUENCING | Homo sapiens | 36,044 | 1-Jul-99 |
| | | | | | IN PROGRESS ***, 12 unordered pieces. | | | |
| | | GB_HTG2: AC007940 | 159279 | AC007940 | Homo sapiens clone 44_C_14, *** SEQUENCING | Homo sapiens | 36,044 | 1-Jul-99 |
| | | | | | IN PROGRESS ***, 12 unordered pieces. | | | |
| rxa01476 | 465 | GB_PL1: AB009087 | 1074 | AB009087 | Chlamydomonas sp. mRNA for alternative oxidase, partial cds. | Chlamydomonas sp. | 38,596 | 05-DEC-1997 |
| | | GB_PL1: AB009087 | 1074 | AB009087 | Chlamydomonas sp. mRNA for alternative oxidase, partial cds. | Chlamydomonas sp. | 39,519 | 05-DEC-1997 |
| rxa01479 | 363 | GB_HTG1: HSJ136J15 | 148579 | AL118496 | Homo sapiens chromosome X clone RP1-136J15, *** SEQUENCING | Homo sapiens | 39,886 | 23-Nov-99 |
| | | | | | IN PROGRESS ***, in unordered pieces. | | | |
| | | GB_HTG1: HSJ136J15 | 148579 | AL118496 | Homo sapiens chromosome X clone RP1-136J15, *** SEQUENCING | Homo sapiens | 39,886 | 23-Nov-99 |
| | | | | | IN PROGRESS ***, in unordered pieces. | | | |
| | | GB_HTG2: AC007579 | 134344 | AC007579 | Drosophila melanogaster chromosome 2 clone BACR07M03 | Drosophila melanogaster | 39,266 | 2-Aug-99 |
| | | | | | (D607) RPCI-98 07.M.3 map 53A-53B strain y; cn bw sp, | | | |
| | | | | | *** SEQUENCING IN PROGRESS ***, 108 unordered pieces. | | | |
| rxa01484 | 669 | GB_PR3: AF064858 | 193387 | AF064858 | Homo sapiens chromosome 21q22.3 BAC 28F9, complete sequence. | Homo sapiens | 38,281 | 2-Jun-98 |
| | | GB_GSS10: AQ207755 | 496 | AQ207755 | HS_3026_B1_G04_T7 CIT Approved Human Genomic Sperm Library D | Homo sapiens | 37,150 | 18-Sep-98 |
| | | | | | Homo sapiens genomic clone Plate = 3026 Col = 7 | | | |
| | | | | | Row = N, genomic survey sequence. | | | |
| | | GB_PR3: AF064858 | 193387 | AF064858 | Homo sapiens chromosome 21q22.3 BAC | Homo sapiens | 38,379 | 2-Jun-98 |
| | | | | | 28F9, complete sequence. | | | |
| rxa01485 | 2175 | GB_IN1: CEY50E8A | 61864 | AL117200 | Caenorhabditis elegans cosmid Y50E8A, complete sequence. | Caenorhabditis elegans | 39,617 | 19-Nov-99 |
| | | GB_IN1: CEY50E8A | 61864 | AL117200 | Caenorhabditis elegans cosmid Y50E8A, complete sequence. | Caenorhabditis elegans | 34,349 | 19-Nov-99 |
| | | GB_PL1: AB028606 | 61510 | AB028606 | Arabidopsis thaliana genomic DNA, chromosome 5, BAC clone: | Arabidopsis thaliana | 34,858 | 20-Nov-99 |
| | | | | | F16F17, complete sequence. | | | |
| rxa01488 | 1071 | GB_BA1: CGPROMF10 | 60 | X90358 | C. glutamicum DNA for promoter fragment F10. | Corynebacterium | 65,000 | 4-Nov-96 |
| | | | | | | glutamicum | | |
| | | GB_EST10: AA183656 | 465 | AA183656 | mt20f08.r1 Soares mouse 3NbMS Mus musculus cDNA clone IMAGE: | Mus musculus | 35,333 | 17-Feb-97 |
| | | | | | 621639 5′ similar to WP: T02C12.2 CE01062;, mRNA sequence. | | | |
| | | GB_EST9: AA110912 | 309 | AA110912 | mm02c01.r1 Stratagene mouse kidney (#937315) Mus musculus cDNA | Mus musculus | 37,662 | 4-Feb-97 |
| | | | | | clone IMAGE: 520320 5′ similar to WP: T02C12.2 CE01062;, mRNA sequence. | | | |
| rxa01492 | 927 | GB_EST16: AA589576 | 567 | AA589576 | vl49b06.s1 Stratagene mouse skin (#937313) Mus musculus cDNA clone IMAGE: | Mus musculus | 34,104 | 16-Sep-97 |
| | | | | | 975539 3′ similar to gb: M63488 REPLICATION PROTEIN | | | |
| | | | | | A 70 KD DNA-BINDING SUBUNIT (HUMAN);, mRNA sequence. | | | |
| | | GB_EST28: AU051490 | 865 | AU051490 | AU051490 Sugano mouse brain mncb Mus musculus cDNA clone MNCb-2105 | Mus musculus | 29,837 | 18-MAR-1999 |
| | | | | | 5′, mRNA sequence. | | | |
| | | GB_EST32: AI738234 | 609 | AI738234 | 606044C01.x2 606 - Ear tissue cDNA library from Schmidt lab | Zea mays | 38,291 | 16-Jun-99 |
| | | | | | Zea mays cDNA, mRNA sequence. | | | |
| rxa01494 | 1119 | GB_PR4: AC007106 | 172188 | AC007106 | Homo sapiens chromosome 4 clone C0383J20 map 4p16, complete sequence. | Homo sapiens | 35,108 | 2-Jun-99 |
| | | GB_BA2: AE001093 | 14097 | AE001093 | Archaeoglobus fulgidus section 14 of 172 of the complete genome. | Archaeoglobus fulgidus | 38,113 | 15-DEC-1997 |
| | | GB_PR4: AC007106 | 172188 | AC007106 | Homo sapiens chromosome 4 clone C0383J20 map 4p16, complete sequence. | Homo sapiens | 34,657 | 2-Jun-99 |
| rxa01497 | 1041 | GB_BA2: SCJ1 | 36925 | AL109962 | Streptomyces coelicolor cosmid J1. | Streptomyces coelicolor | 50,722 | 24-Sep-99 |
| | | | | | | A3(2) | | |
| | | GB_BA1: MTY20B11 | 36330 | Z95121 | Mycobacterium tuberculosis H37Rv complete genome; segment 139/162. | Mycobacterium | 40,238 | 17-Jun-98 |
| | | | | | | tuberculosis | | |
| | | GB_BA1: PAU12891 | 4062 | U12891 | Pseudomonas aeruginosa PAO substrain OT684 pyoverdine gene transcriptional | Pseudomonas aeruginosa | 39,856 | 03-OCT-1996 |
| | | | | | regulator PvdS (pvdS) gene, complete cds. | | | |
| rxa01501 | 411 | GB_PAT: I78757 | 2203 | I78757 | Sequence 13 from patent U.S. Pat. No. 5693781. | Unknown. | 61,364 | 3-Apr-98 |
| | | GB_PAT: I92046 | 2203 | I92046 | Sequence 13 from patent U.S. Pat. No. 5726299. | Unknown. | 61,364 | 01-DEC-1998 |
| | | GB_PR4: AC002427 | 101098 | AC002427 | Homo sapiens BAC clone GS011E15 from 5q31, complete sequence. | Homo sapiens | 42,250 | 02-DEC-1998 |
| rxa01504 | 732 | GB_HTG3: AC008954 | 23046 | AC008954 | Homo sapiens chromosome 5 clone CITB-H1_2340N2, *** SEQUENCING | Homo sapiens | 37,830 | 3-Aug-99 |
| | | | | | IN PROGRESS ***, 51 unordered pieces. | | | |
| | | GB_HTG3: AC008954 | 23046 | AC008954 | Homo sapiens chromosome 5 clone CITB-H1_2340N2, *** SEQUENCING | Homo sapiens | 37,830 | 3-Aug-99 |
| | | | | | IN PROGRESS ***, 51 unordered pieces. | | | |
| | | GB_BA1: QPHQSOP | 4068 | L28041 | Plasmid QpH1 (from Coxiella burnetii) qsopA and qsopB genes, promoter region. | Plasmid QpH1 | 37,517 | 14-Jul-95 |
| rxa01505 | 621 | GB_SY: SYNM13GAL | 66 | M10216 | Bacteriophage M13gt102 N-terminal beta-galactosidase gene (lac+ phenotype). | unidentified cloning vector | 62,121 | 27-Apr-93 |
| | | GB_SY: SYNM13GAL | 66 | M10216 | Bacteriophage M13gt102 N-terminal beta-galactosidase gene (lac+ phenotype). | unidentified cloning vector | 62,121 | 27-Apr-93 |
| | | GB_BA2: BJU56817 | 2892 | U56817 | Bradyrhizobium japonicum aconitase (acnA) gene, complete cds. | Bradyrhizobium japonicum | 40,214 | 13-Nov-96 |
| rxa01506 | 534 | GB_BA1: MTCY98 | 31225 | Z83860 | Mycobacterium tuberculosis H37Rv complete genome; segment 103/162. | Mycobacterium | 38,274 | 17-Jun-98 |
| | | | | | | tuberculosis | | |
| | | GB_BA1: MTCY98 | 31225 | Z83860 | Mycobacterium tuberculosis H37Rv complete genome; segment 103/162. | Mycobacterium | 33,710 | 17-Jun-98 |
| | | | | | | tuberculosis | | |
| rxa01507 | 546 | GB_RO: D89731 | 1815 | D89731 | Rattus norvegicus mRNA for AIM-1, complete cds. | Rattus norvegicus | 38,125 | 7-Feb-99 |
| | | GB_RO: D89731 | 1815 | D89731 | Rattus norvegicus mRNA for AIM-1, complete cds. | Rattus norvegicus | 34,600 | 7-Feb-99 |
| rxa01518 | | | | | | | | |
| rxa01519 | 870 | GB_HTG2: AC007929 | 123885 | AC007929 | Drosophila melanogaster chromosome 3 clone BACR05C11 (D759) | Drosophila melanogaster | 34,075 | 2-Aug-99 |
| | | | | | RPCI-98 05.C.11 map 95A-95C strain y; cn bw | | | |
| | | | | | sp, *** SEQUENCING IN PROGRESS ***, 85 unordered pieces. | | | |
| | | GB_HTG2: AC007929 | 123885 | AC007929 | Drosophila melanogaster chromosome 3 clone BACR05C11 (D759) | Drosophila melanogaster | 34,075 | 2-Aug-99 |
| | | | | | RPCI-98 05.C.11 map 95A-95C strain y; cn bw | | | |
| | | | | | sp, *** SEQUENCING IN PROGRESS***, 85 unordered pieces. | | | |
| | | GB_PL2: AC011437 | 95310 | AC011437 | Arabidopsis thaliana chromosome III BAC F7O18 genomic sequence, | Arabidopsis thaliana | 37,280 | 2-Nov-99 |
| | | | | | complete sequence. | | | |
| rxa01520 | | | | | | | | |
| rxa01523 | 1074 | GB_GSS11: AQ270206 | 389 | AQ270206 | HS_2037_A1_G10_T7 CIT Approved Human Genomic Sperm Library D | Homo sapiens | 38,046 | 3-Nov-98 |
| | | | | | Homo sapiens genomic clone Plate = 2037 Col = 19 Row = M, | | | |
| | | | | | genomic survey sequence. | | | |
| | | GB_GSS14: AQ588624 | 480 | AQ588624 | CITBI-E1-2643C9.TF CITBI-E1 Homo sapiens genomic clone 2643C9, | Homo sapiens | 36,875 | 7-Jun-99 |
| | | | | | genomic survey sequence. | | | |
| | | GB_HTG1: CEY80D3 | 245017 | AL020988 | Caenorhabditis elegans chromosome V clone Y80D3, *** SEQUENCING | Caenorhabditis elegans | 35,646 | 6-Sep-99 |
| | | | | | IN PROGRESS ***, in unordered pieces. | | | |
| rxa01525 | 1845 | GB_PR3: HS560B9 | 99074 | Z98751 | Human DNA sequence from PAC 560B9 on chromosome 1q24-1q25. Contains | Homo sapiens | 37,981 | 23-Nov-99 |
| | | | | | profilin-like pseudogene, 60S ribosomal protein L4 pseudogene | | | |
| | | | | | RNA binding protein, ESTs, GSS. | | | |
| | | GB_PR3: HS560B9 | 99074 | Z98751 | Human DNA sequence from PAC 560B9 on chromosome 1q24-1q25. | Homo sapiens | 37,982 | 23-Nov-99 |
| | | | | | Contains profilin-like pseudogene, 60S ribosomal protein L4 pseudogene | | | |
| | | | | | RNA binding protein, ESTs, GSS. | | | |
| rxa01527 | | | | | | | | |
| rxa01536 | 1365 | GB_HTG3: AC010745 | 193862 | AC010745 | Homo sapiens clone NH0549D18, *** SEQUENCING | Homo sapiens | 35,277 | 21-Sep-99 |
| | | | | | IN PROGRESS ***, 30 unordered pieces. | | | |
| | | GB_HTG3: AC010745 | 193862 | AC010745 | Homo sapiens clone NH0549D18, *** SEQUENCING | Homo sapiens | 35,277 | 21-Sep-99 |
| | | | | | IN PROGRESS ***, 30 unordered pieces. | | | |
| | | GB_HTG3: AC010745 | 193862 | AC010745 | Homo sapiens clone NH0549D18, *** SEQUENCING | Homo sapiens | 35,958 | 21-Sep-99 |
| | | | | | IN PROGRESS ***, 30 unordered pieces. | | | |
| rxa01539 | 2289 | GB_BA1: CGPROMF10 | 60 | X90358 | C. glutamicum DNA for promoter fragment F10. | Corynebacterium | 61,667 | 4-Nov-96 |
| | | | | | | glutamicum | | |
| | | GB_HTG3: AC011577 | 151996 | AC011577 | Homo sapiens clone 12_P_19, LOW-PASS SEQUENCE SAMPLING. | Homo sapiens | 35,554 | 07-OCT-1999 |
| | | GB_HTG3: AC011577 | 151996 | AC011577 | Homo sapiens clone 12_P_19, LOW-PASS SEQUENCE SAMPLING. | Homo sapiens | 35,554 | 07-OCT-1999 |
| rxa01540 | 825 | GB_EST10: AA152819 | 491 | AA152819 | mq67e04.r1 Soares 2NbMT Mus musculus cDNA clone IMAGE: | Mus musculus | 39,040 | 18-Feb-97 |
| | | | | | 583806 5′, mRNA sequence. | | | |
| | | GB_EST29: AI616027 | 481 | AI616027 | mq67e04.y1 Soares 2NbMT Mus musculus cDNA clone IMAGE: | Mus musculus | 36,688 | 21-Apr-99 |
| | | | | | 583806 5′, mRNA sequence. | | | |
| | | GB_GSS6: AQ843942 | 468 | AQ843942 | LMAJFV1_lm03d08.x2 Leishmania major FV1 random genomic library | Leishmania major | 40,899 | 04-OCT-1999 |
| | | | | | Leishmania major genomic clone LMAJFV1_lm03d08 3′, genomic survey sequence. | | | |
| rxa01543 | 2889 | GB_BA2: ECOUW67_0 | 110000 | U18997 | Escherichia coli K-12 chromosomal region from 67.4 to 76.0 minutes. | Escherichia coli | 36,618 | 15-Sep-99 |
| | | GB_BA2: ECOUW67_0 | 110000 | U18997 | Escherichia coli K-12 chromosomal region from 67.4 to 76.0 minutes. | Escherichia coli | 38,415 | 15-Sep-99 |
| | | GB_BA2: AE000397 | 14820 | AE000397 | Escherichia coli K-12 MG1655 section 287 of 400 of the complete genome. | Escherichia coli | 37,594 | 12-Nov-98 |
| rxa01544 | 723 | GB_EST37: AI977486 | 479 | AI977486 | EST272080 Schistosoma mansoni male, Phil LoVerde/Joe Merrick | Schistosoma mansoni | 44,156 | 27-Aug-99 |
| | | | | | Schistosoma mansoni cDNA clone SMMAM80 5′ end, mRNA sequence. | | | |
| | | GB_VI: AF056119 | 564 | AF056119 | HIV-1 isolate z560 from Zimbabwe, envelope glycoprotein V3-V5 region | Human immunodeficiency | 35,874 | 26-Sep-98 |
| | | | | | (env) gene, partial cds. | virus type 1 | | |
| | | GB_VI: AF056119 | 564 | AF056119 | HIV-1 isolate z560 from Zimbabwe, envelope glycoprotein V3-V5 region | Human immunodeficiency | 37,229 | 26-Sep-98 |
| | | | | | (env) gene, partial cds. | virus type 1 | | |
| rxa01545 | 1374 | GB_HTG1: CEY53C10_1 | 110000 | Z93340 | Caenorhabditis elegans chromosome I clone Y53C10, *** SEQUENCING | Caenorhabditis elegans | 36,885 | 4-Nov-98 |
| | | | | | IN PROGRESS ***, in unordered pieces. | | | |
| | | GB_HTG1: CEY53C10_1 | 110000 | Z93340 | Caenorhabditis elegans chromosome I clone Y53C10, *** SEQUENCING | Caenorhabditis elegans | 36,885 | 4-Nov-98 |
| | | | | | IN PROGRESS ***, in unordered pieces. | | | |
| | | GB_HTG1: CEY47H9_1 | 110000 | Z92853 | Caenorhabditis elegans chromosome I clone Y47H9, *** SEQUENCING | Caenorhabditis elegans | 30,285 | 4-Sep-98 |
| | | | | | IN PROGRESS ***, in unordered pieces. | | | |
| rxa01546 | 819 | GB_GSS3: B58207 | 420 | B58207 | CIT-HSP-2012C11.TR CIT-HSP Homo sapiens genomic clone 2012C11, | Homo sapiens | 45,228 | 20-Jun-98 |
| | | | | | genomic survey sequence. | | | |
| | | GB_IN1: HAU02678 | 623 | U02678 | Helicoverpa armigera mitochondrion D-loop, partial 12S rRNA | Mitochondrion Helicoverpa | 37,500 | 27-OCT-1993 |
| | | | | | gene, and partial tRNA-Met gene. | armigera | | |
| | | GB_EST19: AA769027 | 473 | AA769027 | oa78g01.s1 NCI_CGAP_GCB1 Homo sapiens cDNA clone IMAGE: 1318416 | Homo sapiens | 39,583 | 28-Jan-98 |
| | | | | | 3′ similar to TR: Q92617 Q92617 MYELOBLAST KIAA0220;, mRNA sequence. | | | |
| rxa01547 | 786 | GB_EST26: AU002373 | 837 | AU002373 | AU002373 Bombyx mori p50(Daizo) Bombyx mori cDNA | Bombyx mori | 37,698 | 15-Jan-99 |
| | | | | | clone mg0832, mRNA sequence. | | | |
| | | GB_EST30: AV025617 | 494 | AV025617 | AV025617 Mus musculus adult C57BL/6J lung Mus musculus cDNA | Mus musculus | 38,316 | 31-Aug-99 |
| | | | | | clone 1200014J18, mRNA sequence. | | | |
| | | GB_EST26: AU002373 | 837 | AU002373 | AU002373 Bombyx mori p50(Daizo) Bombyx mori cDNA | Bombyx mori | 36,767 | 15-Jan-99 |
| | | | | | clone mg0832, mRNA sequence. | | | |
| rxa01548 | 1131 | GB_IN1: PFARBPCA | 8841 | M88097 | Plasmodium vivax retyculocyte binding protein 1 gene, complete cds. | Plasmodium vivax | 37,077 | 26-Apr-93 |
| | | GB_PAT: I55034 | 1985 | I55034 | Sequence 2 from patent U.S. Pat. No. 5646247. | Unknown. | 38,250 | 07-OCT-1997 |
| | | GB_OV: GGNEUROMP | 1112 | Y09597 | G. gallus mRNA for NeuroM protein. | Gallus gallus | 37,104 | 15-OCT-1997 |
| rxa01549 | 1727 | GB_PR4: HSLONPG01 | 2443 | AF059296 | Homo sapiens LON protease (LON) gene, nuclear gene encoding | Homo sapiens | 39,401 | 11-Apr-99 |
| | | | | | mitochondrial protein, exon 1. | | | |
| | | GB_EST33: AI770254 | 555 | AI770254 | SAL2.F12 Black Tiger Shrimp Whole Cephalothorax UniZap library | Penaeus monodon | 40,325 | 28-Jun-99 |
| | | | | | Penaeus monodon cDNA clone | | | |
| | | | | | SAL2.F12 5′ similar to muscle myosin heavy chain, mRNA sequence. | | | |
| | | GB_PR1: HSU02389 | 3179 | U02389 | Human hLON ATP-dependent protease mRNA, nuclear gene encoding | Homo sapiens | 38,868 | 27-Jan-95 |
| | | | | | mitochondrial protein, complete cds. | | | |
| rxa01552 | 1101 | GB_HTG4: AC011192 | 144277 | AC011192 | Homo sapiens clone hRPK.53_A_1, *** SEQUENCING | Homo sapiens | 36,296 | 19-OCT-1999 |
| | | | | | IN PROGRESS ***, 9 unordered pieces. | | | |
| | | GB_HTG4: AC011192 | 144277 | AC011192 | Homo sapiens clone hRPK.53_A_1, *** SEQUENCING | Homo sapiens | 36,296 | 19-OCT-1999 |
| | | | | | IN PROGRESS ***, 9 unordered pieces. | | | |
| | | GB_HTG3: AC011203 | 70518 | AC011203 | Homo sapiens chromosome 3 clone 78_O_24 map 3, | Homo sapiens | 36,440 | 03-OCT-1999 |
| | | | | | LOW-PASS SEQUENCE SAMPLING. | | | |
| rxa01554 | 2265 | GB_EST27: AA957437 | 340 | AA957437 | UI-R-E1-fy-g-02-0-UI.s1 UI-R-E1 Rattus norvegicus cDNA clone | Rattus norvegicus | 39,039 | 4-Jul-99 |
| | | | | | UI-R-E1-fy-g-02-0-UI 3′, mRNA sequence. | | | |
| | | GB_PL2: SPBC19G7 | 37727 | AL021839 | S. pombe chromosome II cosmid c19G7. | Schizosaccharomyces | 36,991 | 17-Nov-99 |
| | | | | | | pombe | | |
| | | GB_PL1: HVPROTZ | 703 | X05902 | Barley mRNA fragment for protein Z. | Hordeum vulgare | 36,390 | 13-Jul-95 |
| rxa01557 | 939 | GB_EST24: AI167051 | 429 | AI167051 | xylem.est.822 Poplar xylem Lambda ZAPII library Populus balsamifera | Populus balsamifera | 40,326 | 03-DEC-1998 |
| | | | | | subsp. trichocarpa cDNA 5′, mRNA sequence. | subsp. trichocarpa | | |
| | | GB_PL2: AC007259 | 97146 | AC007259 | Arabidopsis thaliana chromosome I BAC T28P6 genomic | Arabidopsis thaliana | 34,442 | 17-Aug-99 |
| | | | | | sequence, complete sequence. | | | |
| | | GB_PL2: AC007259 | 97146 | AC007259 | Arabidopsis thaliana chromosome I BAC T28P6 genomic | Arabidopsis thaliana | 34,967 | 17-Aug-99 |
| | | | | | sequence, complete sequence. | | | |
| rxa01560 | | | | | | | | |
| rxa01574 | 1158 | GB_PR3: AC005242 | 160262 | AC005242 | Homo sapiens chromosome 17, clone hRPK.118_F_13, complete sequence. | Homo sapiens | 35,727 | 22-Jul-98 |
| | | GB_PR3: AC005242 | 160262 | AC005242 | Homo sapiens chromosome 17, clone hRPK.118_F_13, complete sequence. | Homo sapiens | 33,969 | 22-Jul-98 |
| | | GB_HTG2: AC007604 | 167373 | AC007604 | Homo sapiens chromosome 16 clone 344L6, *** SEQUENCING | Homo sapiens | 36,028 | 20-MAY-1999 |
| | | | | | IN PROGRESS***, 85 unordered pieces. | | | |
| rxa01575 | 1143 | GB_PR4: AC004738 | 147404 | AC004738 | Homo sapiens Chromosome 15q11-q13 PAC clone pDJ351h23 from the | Homo sapiens | 37,312 | 25-Nov-98 |
| | | | | | Prader-Willi/Angelman Syndrome region, complete sequence. | | | |
| | | GB_PR3: AC005250 | 94336 | AC005250 | Homo sapiens BAC clone RG318M05 from 7q22-q31.1, complete sequence. | Homo sapiens | 38,201 | 3-Jul-98 |
| | | GB_GSS11: AQ300376 | 487 | AQ300376 | HS_2206_A2_D05_MR CIT Approved Human Genomic Sperm Library D | Homo sapiens | 35,345 | 16-DEC-1998 |
| | | | | | Homo sapiens genomic clone Plate = 2206 Col = 10 | | | |
| | | | | | Row = G, genomic survey sequence. | | | |
| rxa01577 | 498 | GB_BA1: MTY15C10 | 33050 | Z95436 | Mycobacterium tuberculosis H37Rv complete genome; segment 154/162. | Mycobacterium | 58,385 | 17-Jun-98 |
| | | | | | | tuberculosis | | |
| | | GB_BA2: AF030975 | 2511 | AF030975 | Aeromonas salmonicida chaperonin GroES and chaperonin GroEL genes, | Aeromonas salmonicida | 41,322 | 2-Apr-98 |
| | | | | | complete cds. | | | |
| | | GB_EST7: W33355 | 488 | W33355 | mb97g01.r1 Soares mouse p3NMF19.5 Mus musculus cDNA clone IMAGE: 337392 | Mus musculus | 40,230 | 11-Sep-96 |
| | | | | | 5′ similar to gb: X58196_cds1 M. musculus H19 | | | |
| | | | | | mRNA (MOUSE);, mRNA sequence. | | | |
| rxa01579 | 507 | GB_GSS1: GGA300114 | 662 | AJ231964 | Gallus gallus anonymous sequence from Cosmid mapping to chicken chromosome | Gallus gallus | 38,023 | 25-Aug-98 |
| | | | | | 3 (Cosmid 30 - Contig 14), genomic survey sequence. | | | |
| | | GB_GSS1: GGA300114 | 662 | AJ231964 | Gallus gallus anonymous sequence from Cosmid mapping to chicken chromosome | Gallus gallus | 38,608 | 25-Aug-98 |
| | | | | | 3 (Cosmid 30 - Contig 14), genomic survey sequence. | | | |
| rxa01585 | 750 | GB_PR4: AC004815 | 120538 | AC004815 | Homo sapiens clone 82F9, complete sequence. | Homo sapiens | 35,383 | 8-Sep-99 |
| | | GB_PR2: AP000151 | 100000 | AP000151 | Homo sapiens genomic DNA, chromosome 21q22.2, DSCR region, clone | Homo sapiens | 39,722 | 20-Nov-99 |
| | | | | | D47-S479, segment 3/16, complete sequence. | | | |
| | | GB_PR2: AP000151 | 100000 | AP000151 | Homo sapiens genomic DNA, chromosome 21q22.2, DSCR region, clone | Homo sapiens | 34,683 | 20-Nov-99 |
| | | | | | D47-S479, segment 3/16, complete sequence. | | | |
| rxa01586 | 392 | GB_GSS5: AQ791385 | 522 | AQ791385 | HS_5268_A2_C05_T7A RPCI-11 Human Male BAC Library | Homo sapiens | 43,235 | 3-Aug-99 |
| | | | | | Homo sapiens genomic clone Plate = 844 Col = 10 | | | |
| | | | | | Row = E, genomic survey sequence. | | | |
| | | GB_EST15: AA463774 | 255 | AA463774 | aa09f10.r1 Soares_NhHMPu_S1 Homo sapiens cDNA clone IMAGE: | Homo sapiens | 42,045 | 10-Jun-97 |
| | | | | | 812779 5′ similar to gb: X07868_rna1 PUTATIVE INSULIN-LIKE GROWTH | | | |
| | | | | | FACTOR II ASSOCIATED (HUMAN); contains element PTR7 repetitive | | | |
| | | | | | element;, mRNA sequence. | | | |
| | | GB_PR1: AP000010 | 100000 | AP000010 | Homo sapiens genomic DNA of 21q22.2 Down Syndrome region, segment 3/13. | Homo sapiens | 38,684 | 24-Apr-99 |
| rxa01590 | | | | | | | | |
| rxa01592 | 1425 | GB_HTG2: AC008163 | 135300 | AC008163 | Homo sapiens clone NH0005B09, *** SEQUENCING | Homo sapiens | 34,141 | 31-Jul-99 |
| | | | | | IN PROGRESS ***, 1 unordered pieces. | | | |
| | | GB_HTG2: AC008163 | 135300 | AC008163 | Homo sapiens clone NH0005B09, *** SEQUENCING | Homo sapiens | 34,141 | 31-Jul-99 |
| | | | | | IN PROGRESS ***, 1 unordered pieces. | | | |
| | | GB_HTG3: AC009231 | 181006 | AC009231 | Homo sapiens clone NH0350124, *** SEQUENCING | Homo sapiens | 36,767 | 6-Aug-99 |
| | | | | | IN PROGRESS ***, 2 unordered pieces. | | | |
| rxa01595 | 1083 | GB_BA1: MTCI125 | 37432 | Z98268 | Mycobacterium tuberculosis H37Rv complete genome; segment 76/162. | Mycobacterium | 57,955 | 17-Jun-98 |
| | | | | | | tuberculosis | | |
| | | GB_BA1: MTHYPROT | 2544 | X98295 | M. tuberculosis TlyA gene. | Mycobacterium | 57,955 | 2-Jun-98 |
| | | | | | | tuberculosis | | |
| | | GB_BA1: U00021 | 39193 | U00021 | Mycobacterium leprae cosmid L247. | Mycobacterium leprae | 35,261 | 29-Sep-94 |
| rxa01597 | 1305 | GB_HTG3: AC009462 | 103046 | AC009462 | Drosophila melanogaster chromosome 3 clone BACR27G04 (D985) | Drosophila melanogaster | 38,898 | 30-Aug-99 |
| | | | | | RPCI-98 27.G.4 map 90E—90E strain y; cn bw sp, *** SEQUENCING | | | |
| | | | | | IN PROGRESS***, 88 unordered pieces. | | | |
| | | GB_HTG3: AC009462 | 103046 | AC009462 | Drosophila melanogaster chromosome 3 clone BACR27G04 (D985) | Drosophila melanogaster | 38,898 | 30-Aug-99 |
| | | | | | RPCI-98 27.G.4 map 90E—90E strain y; cn bw sp, *** SEQUENCING | | | |
| | | | | | IN PROGRESS***, 88 unordered pieces. | | | |
| | | GB_HTG2: AC006889 | 267118 | AC006889 | Caenorhabditis elegans clone Y65B4, *** SEQUENCING | Caenorhabditis elegans | 36,236 | 26-Feb-99 |
| | | | | | IN PROGRESS ***, 6 unordered pieces. | | | |
| rxa01598 | 1086 | GB_EST2: R02663 | 397 | R02663 | ye80a04.r1 Soares fetal liver spleen 1NFLS Homo sapiens cDNA clone | Homo sapiens | 36,272 | 31-MAR-1995 |
| | | | | | IMAGE: 124014 5′, mRNA sequence. | | | |
| | | GB_EST6: W03663 | 346 | W03663 | za65b08.r1 Soares fetal liver spleen 1NFLS Homo sapiens cDNA clone | Homo sapiens | 42,775 | 19-Apr-96 |
| | | | | | IMAGE: 297399 5′, mRNA sequence. | | | |
| | | GB_IN2: AC007765 | 163403 | AC007765 | Drosophila melanogaster, chromosome 2L, region 23C1-23C5, P1 clones | Drosophila melanogaster | 38,351 | 9-Jun-99 |
| | | | | | DS02190 and DS00906, complete sequence. | | | |
| rxa01600 | 792 | GB_STS: G39530 | 822 | G39530 | Z22942 Zebrafish AB Danio rerio STS genomic, sequence tagged site. | Danio rerio | 41,242 | 31-Jul-98 |
| | | GB_STS: G39530 | 822 | G39530 | Z22942 Zebrafish AB Danio rerio STS genomic, sequence tagged site. | Danio rerio | 41,242 | 31-Jul-98 |
| | | GB_PR3: HSDJ991C6 | 128995 | AL078599 | Human DNA sequence from clone 991C6 on chromosome | Homo sapiens | 35,188 | 23-Nov-99 |
| | | | | | 6q14.1-15, complete sequence. | | | |
| rxa01602 | 1653 | GB_EST38: AW033000 | 685 | AW033000 | EST276559 tomato callus, TAMU Lycopersicon esculentum cDNA | Lycopersicon esculentum | 44,706 | 15-Sep-99 |
| | | | | | clone cLEC19N6, mRNA sequence. | | | |
| | | GB_PL2: SPAC3C7 | 35052 | Z99568 | S. pombe chromosome I cosmid c3C7. | Schizosaccharomyces | 38,158 | 29-Nov-99 |
| | | | | | | pombe | | |
| | | GB_PL2: SPAC3C7 | 35052 | Z99568 | S. pombe chromosome I cosmid c3C7. | Schizosaccharomyces | 37,888 | 29-Nov-99 |
| | | | | | | pombe | | |
| rxa01605 | 1638 | GB_HTG3: AC008689 | 145122 | AC008689 | Homo sapiens chromosome 5 clone CIT978SKB_61G23, *** SEQUENCING | Homo sapiens | 35,448 | 3-Aug-99 |
| | | | | | IN PROGRESS ***, 44 unordered pieces. | | | |
| | | GB_HTG3: AC008689 | 145122 | AC008689 | Homo sapiens chromosome 5 clone CIT978SKB_61G23, *** SEQUENCING | Homo sapiens | 35,448 | 3-Aug-99 |
| | | | | | IN PROGRESS ***, 44 unordered pieces. | | | |
| | | GB_HTG3: AC009175 | 233932 | AC009175 | Homo sapiens chromosome 5 clone RPCI-PAC_241C15, *** SEQUENCING | Homo sapiens | 37,423 | 3-Aug-99 |
| | | | | | IN PROGRESS ***, 94 unordered pieces. | | | |
| rxa01610 | 852 | GB_BA1: ECU82664 | 139818 | U82664 | Escherichia coli minutes 9 to 11 genomic sequence. | Escherichia coli | 34,198 | 11-Jan-97 |
| | | GB_BA1: ECU82664 | 139818 | U82664 | Escherichia coli minutes 9 to 11 genomic sequence. | Escherichia coli | 36,949 | 11-Jan-97 |
| | | GB_BA1: D90845 | 19366 | D90845 | E. coli genomic DNA, Kohara clone #356(46.1-46.5 min.). | Escherichia coli | 39,808 | 21-MAR-1997 |
| rxa01611 | 480 | GB_PR3: AC005581 | 39601 | AC005581 | Homo sapiens chromosome 19, cosmid R31237, complete sequence. | Homo sapiens | 38,901 | 1-Sep-98 |
| | | GB_EST35: AI809560 | 443 | AI809560 | wf30h09.x1 Soares_NFL_T_GBC_S1 Homo sapiens cDNA clone IMAGE: | Homo sapiens | 35,989 | 7-Jul-99 |
| | | | | | 2357153 3′, mRNA sequence. | | | |
| | | GB_EST25: AI279953 | 416 | AI279953 | qh90b02.x1 Soares_NFL_T_GBC_S1 Homo sapiens cDNA clone IMAGE: | Homo sapiens | 35,276 | 27-Jan-99 |
| | | | | | 1854219 3′, mRNA sequence. | | | |
| rxa01612 | | | | | | | | |
| rxa01618 | 507 | GB_GSS14: AQ506815 | 616 | AQ506815 | RPCI-11-316B19.TV RPCI-11 Homo sapiens genomic clone | Homo sapiens | 41,901 | 29-Apr-99 |
| | | | | | RPCI-11-316B19, genomic survey sequence. | | | |
| | | GB_HTG2: AC007512 | 168140 | AC007512 | Homo sapiens clone hRPK.96_A_1, *** SEQUENCING | Homo sapiens | 39,549 | 07-MAY-1999 |
| | | | | | IN PROGRESS ***, 14 unordered pieces. | | | |
| | | GB_HTG2: AC007512 | 168140 | AC007512 | Homo sapiens clone hRPK.96_A_1, *** SEQUENCING | Homo sapiens | 39,549 | 07-MAY-1999 |
| | | | | | IN PROGRESS ***, 14 unordered pieces. | | | |
| rxa01619 | 1098 | GB_BA1: ECOUW93 | 338534 | U14003 | Escherichia coli K-12 chromosomal region from 92.8 to 00.1 minutes. | Escherichia coli | 39,459 | 17-Apr-96 |
| | | GB_BA2: AE000497 | 10334 | AE000497 | Escherichia coli K-12 MG1655 section 387 of 400 of the complete genome. | Escherichia coli | 39,459 | 12-Nov-98 |
| | | GB_BA1: ECOLEUX | 2147 | M96355 | Escherichia coli leucine tRNA gene and ORF1 gene, complete cds. | Escherichia coli | 41,434 | 26-Jul-95 |
| rxa01622 | 726 | GB_PR4: AC007664 | 162470 | AC007664 | Homo sapiens, complete sequence. | Homo sapiens | 37,006 | 18-Sep-99 |
| | | GB_PR4: AC002472 | 147100 | AC002472 | Homo sapiens Chromosome 22q11.2 PAC Clone p_n5 In BCRL2-GGT | Homo sapiens | 33,058 | 13-Sep-99 |
| | | | | | Region, complete sequence. | | | |
| | | GB_BA1: SYCSLRG | 135638 | D64005 | Synechocystis sp. PCC6803 complete genome, 24/27, 3002966-3138603. | Synechocystis sp. | 38,755 | 13-Feb-99 |
| rxa01623 | 834 | GB_HTG4: AC007422 | 156484 | AC007422 | Homo sapiens clone hRPK.68_A_1, *** SEQUENCING | Homo sapiens | 36,759 | 23-OCT-1999 |
| | | | | | IN PROGRESS ***, 3 unordered pieces. | | | |
| | | GB_HTG4: AC007422 | 156484 | AC007422 | Homo sapiens clone hRPK.68_A_1, *** SEQUENCING | Homo sapiens | 36,759 | 23-OCT-1999 |
| | | | | | IN PROGRESS ***, 3 unordered pieces. | | | |
| | | GB_HTG4: AC007422 | 156484 | AC007422 | Homo sapiens clone hRPK.68_A_1, *** SEQUENCING | Homo sapiens | 33,495 | 23-OCT-1999 |
| | | | | | IN PROGRESS ***, 3 unordered pieces. | | | |
| rxa01624 | 468 | GB_BA2: AE001816 | 10007 | AE001816 | Thermotoga maritima section 128 of 136 of the complete genome. | Thermotoga maritima | 38,852 | 2-Jun-99 |
| | | GB_RO: CCPH20 | 2152 | X56332 | Cavia cobaya mRNA for PH-20 protein. | Cavia porcellus | 38,293 | 20-Feb-91 |
| | | GB_PAT: I89388 | 2152 | I89388 | Sequence 1 from patent U.S. Pat. No. 5721348. | Unknown. | 38,293 | 10-Aug-98 |
| rxa01628 | 1137 | GB_BA1: CGPROPGEN | 2936 | Y12537 | C. glutamicum proP gene. | Corynebacterium | 37,882 | 17-Nov-98 |
| | | | | | | glutamicum | | |
| | | GB_IN1: CET06E6 | 33238 | Z81117 | Caenorhabditis elegans cosmid T06E6, complete sequence. | Caenorhabditis elegans | 38,330 | 2-Sep-99 |
| | | GB_HTG2: AC006916 | 157093 | AC006916 | Caenorhabditis elegans clone Y9C9, *** SEQUENCING | Caenorhabditis elegans | 36,519 | 24-Feb-99 |
| | | | | | IN PROGRESS ***, 3 unordered pieces. | | | |
| rxa01630 | 1200 | GB_PR3: AC004945 | 167372 | AC004945 | Homo sapiens PAC clone DJ0997N05 from 7q11.23-q21.1, complete sequence. | Homo sapiens | 34,996 | 26-Sep-98 |
| | | GB_PR4: AC006385 | 173508 | AC006385 | Homo sapiens clone NH0559J05, complete sequence. | Homo sapiens | 32,525 | 05-MAY-1999 |
| | | GB_PR3: AC004945 | 167372 | AC004945 | Homo sapiens PAC clone DJ0997N05 from 7q11.23-q21.1, complete sequence. | Homo sapiens | 37,972 | 26-Sep-98 |
| rxa01634 | 675 | GB_PR4: AC005901 | 156763 | AC005901 | Homo sapiens chromosome 17, clone hRPK.15_K_2, complete sequence. | Homo sapiens | 35,736 | 20-Jan-99 |
| | | GB_PR4: AC005901 | 156763 | AC005901 | Homo sapiens chromosome 17, clone hRPK.15_K_2, complete sequence. | Homo sapiens | 35,549 | 20-Jan-99 |
| rxa01635 | 864 | GB_HTG3: AC008590 | 268470 | AC008590 | Homo sapiens chromosome 5 clone CIT-HSPC_575D19, *** SEQUENCING | Homo sapiens | 35,370 | 3-Aug-99 |
| | | | | | IN PROGRESS ***, 235 unordered pieces. | | | |
| | | GB_HTG3: AC008590 | 268470 | AC008590 | Homo sapiens chromosome 5 clone CIT-HSPC_575D19, *** SEQUENCING | Homo sapiens | 35,370 | 3-Aug-99 |
| | | | | | IN PROGRESS ***, 235 unordered pieces. | | | |
| | | GB_HTG3: AC008590 | 268470 | AC008590 | Homo sapiens chromosome 5 clone CIT-HSPC_575D19, *** SEQUENCING | Homo sapiens | 38,571 | 3-Aug-99 |
| | | | | | IN PROGRESS ***, 235 unordered pieces. | | | |
| rxa01638 | 1023 | GB_HTG3: AC008261 | 93735 | AC008261 | Arabidopsis thaliana chromosome III clone TAMU-T4P13, *** SEQUENCING | Arabidopsis thaliana | 37,200 | 10-Aug-99 |
| | | | | | IN PROGRESS ***, 1 ordered pieces. | | | |
| | | GB_HTG3: AC008261 | 93735 | AC008261 | Arabidopsis thaliana chromosome III clone TAMU-T4P13, | Arabidopsis thaliana | 37,200 | 10-Aug-99 |
| | | | | | *** SEQUENCING IN PROGRESS ***, 1 ordered pieces. | | | |
| | | GB_HTG3: AC008261 | 93735 | AC008261 | Arabidopsis thaliana chromosome III clone TAMU-T4P13, | Arabidopsis thaliana | 32,637 | 10-Aug-99 |
| | | | | | *** SEQUENCING IN PROGRESS ***, 1 ordered pieces. | | | |
| rxa01641 | 1494 | GB_PR3: HS681N20 | 130263 | AL031670 | Human DNA sequence from clone 681N20 on chromosome 20p12.1-13 Contains | Homo sapiens | 34,676 | 23-Nov-99 |
| | | | | | FTLL1(ferritin, light polypeptide-like 1), a gene similar to Zinc finger, C3HC4 type | | | |
| | | | | | (RING finger), weakly similar to | | | |
| | | | | | SW: GOLI_DROME Q06003 GOLIATH PROTEIN, ESTs, STS, GSS, | | | |
| | | | | | CA repeat (D20S889), CpG Islands, complete sequence. | | | |
| | | GB_HTG4: AC011177 | 168660 | AC011177 | Homo sapiens clone 11_L_8, *** SEQUENCING IN PROGRESS ***, 7 unordered | Homo sapiens | 36,234 | 29-OCT-1999 |
| | | | | | pieces. | | | |
| | | GB_HTG4: AC011177 | 168660 | AC011177 | Homo sapiens clone 11_L_8, *** SEQUENCING IN PROGRESS ***, 7 unordered | Homo sapiens | 36,234 | 29-OCT-1999 |
| | | | | | pieces. | | | |
| rxa01642 | 1365 | GB_BA1: MTY15F10 | 38204 | Z94121 | Mycobacterium tuberculosis H37Rv complete genome; segment 161/162. | Mycobacterium | 37,723 | 17-Jun-98 |
| | | | | | | tuberculosis | | |
| | | GB_BA1: SC3C3 | 31382 | AL031231 | Streptomyces coelicolor cosmid 3C3. | Streptomyces coelicolor | 39,602 | 10-Aug-98 |
| | | GB_BA1: SCU33176 | 1238 | U33176 | Streptomyces coelicolor serine protease gene, complete cds. | Streptomyces coelicolor | 41,467 | 9-Jan-96 |
| rxa01643 | 549 | GB_IN1: CEZC101 | 26147 | Z93395 | Caenorhabditis elegans cosmid ZC101, complete sequence. | Caenorhabditis elegans | 36,280 | 23-Jul-99 |
| | | GB_EST16: C47058 | 360 | C47058 | C47058 Yuji Kohara unpublished cDNA: Strain N2 hermaphrodite embryo | Caenorhabditis elegans | 39,944 | 18-OCT-1999 |
| | | | | | Caenorhabditis elegans cDNA clone yk432e11 5′, mRNA sequence. | | | |
| | | GB_HTG1: CEY54E2_1 | 110000 | Z92861 | Caenorhabditis elegans chromosome II clone Y54E2, | Caenorhabditis elegans | 36,280 | 29-Jul-98 |
| | | | | | *** SEQUENCING IN PROGRESS ***, in unordered pieces. | | | |
| rxa01645 | 729 | GB_BA1: MTV025 | 121125 | AL022121 | Mycobacterium tuberculosis H37Rv complete genome; segment 155/162. | Mycobacterium | 60,310 | 24-Jun-99 |
| | | | | | | tuberculosis | | |
| | | GB_BA1: MLCB2407 | 35615 | AL023596 | Mycobacterium leprae cosmid B2407. | Mycobacterium leprae | 37,378 | 27-Aug-99 |
| | | GB BA1: MSGB577COS | 37770 | L01263 | M. leprae genomic dna sequence, cosmid b577. | Mycobacterium leprae | 57,829 | 14-Jun-96 |
| rxa01646 | 942 | GB BA1: MSGB577COS | 37770 | L01263 | M. leprae genomic dna sequence, cosmid b577. | Mycobacterium leprae | 53,781 | 14-Jun-96 |
| | | GB_BA1: MLCB2407 | 35615 | AL023596 | Mycobacterium leprae cosmid B2407. | Mycobacterium leprae | 39,348 | 27-Aug-99 |
| | | GB_BA1: MTV025 | 121125 | AL022121 | Mycobacterium tuberculosis H37Rv complete genome; segment 155/162. | Mycobacterium | 53,503 | 24-Jun-99 |
| | | | | | | tuberculosis | | |
| rxa01647 | 1293 | GB_GSS1: CNS010VB | 837 | AL099473 | Drosophila melanogaster genome survey sequence T7 end of BAC | Drosophila melanogaster | 39,412 | 26-Jul-99 |
| | | | | | BACN05B20 of DrosBAC library from Drosophila melanogaster (fruit fly), | | | |
| | | | | | genomic survey sequence. | | | |
| | | GB_EST1: T55021 | 429 | T55021 | yb42e09.r1 Stratagene fetal spleen (#937205) Homo sapiens cDNA clone IMAGE: | Homo sapiens | 39,730 | 6-Feb-95 |
| | | | | | 73864 5′, mRNA sequence. | | | |
| | | GB_EST38: AL120803 | 505 | AL120803 | DKFZp762E202_r1 762 (synonym: hmel2) Homo sapiens cDNA | Homo sapiens | 40,476 | 27-Sep-99 |
| | | | | | clone DKFZp762E202 5′, mRNA sequence. | | | |
| rxa01656 | 1020 | GB_BA1: MTCY1A10 | 25949 | Z95387 | Mycobacterium tuberculosis H37Rv complete genome; segment 117/162. | Mycobacterium | 37,771 | 17-Jun-98 |
| | | | | | | tuberculosis | | |
| | | GB_BA1: MLCL581 | 36225 | Z96801 | Mycobacterium leprae cosmid L581. | Mycobacterium leprae | 40,041 | 24-Jun-97 |
| | | GB_PL2: ATAC003028 | 106448 | AC003028 | Arabidopsis thaliana chromosome II BAC F16M14 genomic sequence, | Arabidopsis thaliana | 57,692 | 22-Jul-98 |
| | | | | | complete sequence. | | | |
| rxa01658 | 1856 | GB_BA1: MTV014 | 58280 | AL021646 | Mycobacterium tuberculosis H37Rv complete genome; segment 137/162. | Mycobacterium | 38,877 | 18-Jun-98 |
| | | | | | | tuberculosis | | |
| | | GB_BA1: MTV030 | 29256 | AL021428 | Mycobacterium tuberculosis H37Rv complete genome; segment 4/162. | Mycobacterium | 57,048 | 17-Jun-98 |
| | | | | | | tuberculosis | | |
| | | GB_BA1: MTV014 | 58280 | AL021646 | Mycobacterium tuberculosis H37Rv complete genome; segment 137/162. | Mycobacterium | 40,511 | 18-Jun-98 |
| | | | | | | tuberculosis | | |
| rxa01659 | 669 | GB_HTG3: AC008604 | 136016 | AC008604 | Homo sapiens chromosome 5 clone CIT978SKB_109F8, | Homo sapiens | 35,106 | 3-Aug-99 |
| | | | | | *** SEQUENCING IN PROGRESS ***, 79 unordered pieces. | | | |
| | | GB_HTG3: AC008604 | 136016 | AC008604 | Homo sapiens chromosome 5 clone CIT978SKB_109F8, *** SEQUENCING IN | Homo sapiens | 35,106 | 3-Aug-99 |
| | | | | | PROGRESS ***, 79 unordered pieces. | | | |
| | | GB_HTG3: AC011403 | 124903 | AC011403 | Homo sapiens chromosome 5 clone CIT978SKB_3P13, *** SEQUENCING IN | Homo sapiens | 33,997 | 06-OCT-1999 |
| | | | | | PROGRESS ***, 7 ordered pieces. | | | |
| rxa01663 | 981 | GB_HTG2: AC006799 | 278007 | AC006799 | Caenorhabditis elegans clone Y51H7, *** SEQUENCING IN PROGRESS ***, | Caenorhabditis elegans | 34,787 | 23-Feb-99 |
| | | | | | 7 unordered pieces. | | | |
| | | GB_HTG2: AC006799 | 278007 | AC006799 | Caenorhabditis elegans clone Y51H7, *** SEQUENCING IN PROGRESS ***, | Caenorhabditis elegans | 34,787 | 23-Feb-99 |
| | | | | | 7 unordered pieces. | | | |
| | | GB_HTG2: AC006799 | 278007 | AC006799 | Caenorhabditis elegans clone Y51H7, *** SEQUENCING IN PROGRESS ***, | Caenorhabditis elegans | 39,148 | 23-Feb-99 |
| | | | | | 7 unordered pieces. | | | |
| rxa01665 | 843 | GB_BA1: CGU43535 | 2531 | U43535 | Corynebacterium glutamicum multidrug resistance protein (cmr) gene, complete cds. | Corynebacterium | 37,353 | 9-Apr-97 |
| | | | | | | glutamicum | | |
| | | GB_IN2: AF062971 | 359 | AF062971 | Anoplodactylus portus 28S ribosomal RNA gene, partial sequence. | Anoplodactylus portus | 42,462 | 20-Apr-99 |
| | | GB_EST31: AU062109 | 544 | AU062109 | AU062109 Dictyostelium discoideum SL (H. Urushihara) Dictyostelium discoideum | Dictyostelium discoideum | 34,810 | 20-MAY-1999 |
| | | | | | cDNA clone SLH629, mRNA sequence. | | | |
| rxa01669 | 1038 | GB_BA2: CGU89648 | 1105 | U89648 | Corynebacterium glutamicum unidentified sequence involved in | Corynebacterium | 65,152 | 30-MAR-1999 |
| | | | | | histidine biosynthesis, partial sequence. | glutamicum | | |
| | | GB_IN1: DMC86E4 | 29352 | AL021086 | Drosophila melanogaster cosmid clone 86E4. | Drosophila melanogaster | 39,289 | 27-Apr-99 |
| | | GB_PL1: ENY13759 | 3141 | Y13759 | Emericella nidulans abfB gene. | Emericella nidulans | 38,552 | 05-MAR-1999 |
| rxa01671 | 1272 | GB_PH: MPU46938 | 15664 | U46938 | Mycobacterium phage DS6A, Spe1/Nhel G fragment sequence. | Mycobacterium phage | 60,751 | 29-Jun-96 |
| | | | | | | DS6A | | |
| | | GB_PAT: I31047 | 15664 | I31047 | Sequence 3 from patent U.S. Pat. No. 5582969. | Unknown. | 60,751 | 6-Feb-97 |
| | | GB_PAT: I36863 | 15664 | I36863 | Sequence 3 from patent U.S. Pat. No. 5612182. | Unknown. | 60,751 | 13-MAY-1997 |
| rxa01672 | 465 | GB_GSS14: AQ512046 | 462 | AQ512046 | HS_5113_B1_B10_SP6E RPCI-11 | Homo sapiens | 40,882 | 05-MAY-1999 |
| | | | | | Human Male BAC Library Homo sapiens genomic clone Plate = 689 Col = 19 | | | |
| | | | | | Row = D, genomic survey sequence. | | | |
| | | GB_GSS13: AQ475012 | 253 | AQ475012 | CITBI-E1-2592A3.TR CITBI-E1 Homo sapiens genomic clone 2592A3, | Homo sapiens | 35,417 | 23-Apr-99 |
| | | | | | genomic survey sequence. | | | |
| | | GB_GSS14: AQ512046 | 462 | AQ512046 | HS_5113_B1_B10_SP6E RPCI-11 Human Male BAC | Homo sapiens | 35,106 | 05-MAY-1999 |
| | | | | | Library Homo sapiens genomic clone Plate = 689 Col = 19 Row = D, | | | |
| | | | | | genomic survey sequence. | | | |
| rxa01673 | 1158 | GB_HTG5: AC010988 | 176452 | AC010988 | Homo sapiens clone NH0570F04, WORKING DRAFT SEQUENCE, | Homo sapiens | 37,489 | 11-Nov-99 |
| | | | | | 1 unordered pieces. | | | |
| | | GB_HTG5: AC010988 | 176452 | AC010988 | Homo sapiens clone NH0570F04, WORKING DRAFT SEQUENCE, | Homo sapiens | 35,492 | 11-Nov-99 |
| | | | | | 1 unordered pieces. | | | |
| rxa01675 | 534 | GB_EST19: AA797620 | 497 | AA797620 | vw26b03.r1 Soares mouse mammary gland NbMMG Mus musculus cDNA | Mus musculus | 44,318 | 10-Feb-98 |
| | | | | | clone IMAGE: 1244909 5′, mRNA sequence. | | | |
| | | GB_IN2: AF076597 | 846 | AF076597 | Dictyostelium discoideum ubiquitin-conjugating enzyme protein UbcC (ubcC) mRNA, | Dictyostelium discoideum | 37,149 | 30-Jul-98 |
| | | | | | complete cds. | | | |
| | | GB_EST22: C94466 | 698 | C94466 | C94466 Dictyostelium discoideum SS (H. Urushihara) | Dictyostelium discoideum | 33,647 | 15-Jun-98 |
| | | | | | Dictyostelium discoideum cDNA clone SSL136, mRNA sequence. | | | |
| rxa01676 | 879 | GB_IN1: CELR03H10 | 35080 | U29382 | Caenorhabditis elegans cosmid R03H10. | Caenorhabditis elegans | 40,951 | 22-Jun-95 |
| | | GB_EST37: AI998397 | 584 | AI998397 | 701545552 A. thaliana, Columbia Col-0, rosette-2 Arabidopsis thaliana | Arabidopsis thaliana | 37,333 | 8-Sep-99 |
| | | | | | cDNA clone 701545552, mRNA sequence. | | | |
| | | GB_GSS14: AQ551731 | 577 | AQ551731 | RPCI-11-383J4.TJ RPCI-11 Homo sapiens genomic clone RPCI-11-383J4, | Homo sapiens | 39,321 | 28-MAY-1999 |
| | | | | | genomic survey sequence. | | | |
| rxa01677 | 867 | GB_PL2: ATF6I18 | 122322 | AL022198 | Arabidopsis thaliana DNA chromosome 4, BAC clone F6I18 (ESSA project). | Arabidopsis thaliana | 34,335 | 27-Aug-99 |
| | | GB_PL2: ATF6I18 | 122322 | AL022198 | Arabidopsis thaliana DNA chromosome 4, BAC clone F6I18 (ESSA project). | Arabidopsis thaliana | 34,895 | 27-Aug-99 |
| | | GB_OV: XLSDK2 | 2306 | Y10350 | X. laevis mRNA for nuclear protein SDK2. | Xenopus laevis | 36,538 | 2-Apr-98 |
| rxa01681 | 756 | GB_HTG3: AC010798 | 172575 | AC010798 | Homo sapiens chromosome 18 clone 470_B_24 map 18, *** SEQUENCING IN | Homo sapiens | 37,116 | 23-Sep-99 |
| | | | | | PROGRESS ***, 7 unordered pieces. | | | |
| | | GB_HTG3: AC010798 | 172575 | AC010798 | Homo sapiens chromosome 18 clone 470_B_24 map 18, *** SEQUENCING IN | Homo sapiens | 37,116 | 23-Sep-99 |
| | | | | | PROGRESS ***, 7 unordered pieces. | | | |
| | | GB_PL2: AF085231 | 3158 | AF085231 | Arabidopsis thaliana phytochelatin synthase 1 (AtPCS1) gene, complete cds. | Arabidopsis thaliana | 42,149 | 3-Jun-99 |
| rxa01685 | 702 | GB_HTG1: CEY48A6 | 296699 | Z92854 | Caenorhabditis elegans chromosome III clone Y48A6, *** SEQUENCING IN | Caenorhabditis elegans | 37,393 | 31-Jul-98 |
| | | | | | PROGRESS ***, in unordered pieces. | | | |
| | | GB_HTG1: CEY48A6 | 296699 | Z92854 | Caenorhabditis elegans chromosome III clone Y48A6, *** SEQUENCING IN | Caenorhabditis elegans | 37,393 | 31-Jul-98 |
| | | | | | PROGRESS ***, in unordered pieces. | | | |
| | | GB_HTG1: CEY48A6 | 296699 | Z92854 | Caenorhabditis elegans chromosome III clone Y48A6, *** SEQUENCING IN | Caenorhabditis elegans | 32,946 | 31-Jul-98 |
| | | | | | PROGRESS ***, in unordered pieces. | | | |
| rxa01686 | 564 | GB_EST35: AV156415 | 240 | AV156415 | AV156415 Mus musculus head C57BL/6J 12-day embryo Mus musculus | Mus musculus | 40,417 | 7-Jul-99 |
| | | | | | cDNA clone 3000002G04, mRNA sequence. | | | |
| | | GB_GSS15: AQ611518 | 597 | AQ611518 | HS_5084_B2_H01_T7A RPCI-11 Human Male BAC | Homo sapiens | 41,848 | 15-Jun-99 |
| | | | | | Library Homo sapiens genomic clone Plate = 660 Col = 2 Row = P, | | | |
| | | | | | genomic survey sequence. | | | |
| | | GB_BA1: PDIORAB | 5467 | Z48918 | P. diminuta iorA and iorB genes for isoquinoline 1-oxidoreductase. | Brevundimonas diminuta | 36,709 | 15-Aug-95 |
| rxa01693 | 1545 | GB_IN1: CEF46B6 | 36616 | Z70780 | Caenorhabditis elegans cosmid F46B6, complete sequence. | Caenorhabditis elegans | 36,856 | 04-DEC-1998 |
| | | GB_EST5: L44364 | 362 | L44364 | HUMEST1G5 Human thymus NSTH II Homo sapiens cDNA, mRNA sequence. | Homo sapiens | 38,136 | 17-Jan-96 |
| | | GB_PR2: AF009282 | 414 | AF009282 | Homo sapiens clone FBF3 Cri-du-chat region mRNA. | Homo sapiens | 46,809 | 17-Aug-97 |
| rxa01694 | 1023 | GB_BA1: CGA224946 | 2408 | AJ224946 | Corynebacterium glutamicum DNA for L-Malate: quinone oxidoreductase. | Corynebacterium | 100,000 | 11-Aug-98 |
| | | | | | | glutamicum | | |
| | | GB_EST7: W22650 | 715 | W22650 | 71B2 Human retina cDNA Tsp509I-cleaved sublibrary Homo sapiens cDNA not | Homo sapiens | 37,538 | 06-MAY-1996 |
| | | | | | directional, mRNA sequence. | | | |
| | | GB_PR4: AC005343 | 137213 | AC005343 | Homo sapiens Chromosome 12p13.3 BAC RPCI11-21K20 (Roswell Park Cancer | Homo sapiens | 38,048 | 2-Apr-99 |
| | | | | | Institute Human BAC Library) complete sequence. | | | |
| rxa01696 | 1302 | GB_BA1: MSGB1529CS | 36985 | L78824 | Mycobacterium leprae cosmid B1529 DNA sequence. | Mycobacterium leprae | 67,442 | 15-Jun-96 |
| | | GB_BA1: SC6A5 | 43632 | AL049485 | Streptomyces coelicolor cosmid 6A5. | Streptomyces coelicolor | 66,821 | 24-MAR-1999 |
| | | GB_BA1: MTV003 | 13246 | AL008883 | Mycobacterium tuberculosis H37Rv complete genome; segment 125/162. | Mycobacterium | 38,802 | 17-Jun-98 |
| | | | | | | tuberculosis | | |
| rxa01697 | 1080 | GB_PL2: HNNHAHR | 2559 | L76588 | Helianthus annuus homeodomain protein 1 mRNA, complete cds. | Helianthus annuus | 38,257 | 02-OCT-1997 |
| | | GB_PL2: HNNHAHR | 2559 | L76588 | Helianthus annuus homeodomain protein 1 mRNA, complete cds. | Helianthus annuus | 37,196 | 02-OCT-1997 |
| rxa01701 | 472 | GB_BA2: AF069748 | 2103 | AF069748 | Pseudomonas chlororaphis polyurethanase esterase A (pueA) gene, complete cds. | Pseudomonas chlororaphis | 39,130 | 4-Apr-99 |
| | | GB_BA2: AF069748 | 2103 | AF069748 | Pseudomonas chlororaphis polyurethanase esterase A (pueA) gene, complete cds. | Pseudomonas chlororaphis | 40,271 | 4-Apr-99 |
| rxa01703 | 1236 | GB_BA1: CGFDA | 3371 | X17313 | Corynebacterium glutamicum fda gene for fructose-bisphosphate aldolase | Corynebacterium | 100,000 | 12-Sep-93 |
| | | | | | (EC 4.1.2.13). | glutamicum | | |
| | | GB_EST18: AA728419 | 340 | AA728419 | 33598 CD4-6 Arabidopsis thaliana cDNA clone K2C9RP, mRNA sequence. | Arabidopsis thaliana | 36,176 | 5-Jan-98 |
| | | GB_PL2: ATU90439 | 93639 | U90439 | Arabidopsis thaliana chromosome II BAC T06D20 genomic sequence, | Arabidopsis thaliana | 35,381 | 21-Jul-97 |
| | | | | | complete sequence. | | | |
| rxa01709 | 555 | GB_OV: AF033670 | 2353 | AF033670 | Gallus gallus T-Box protein 4 (TBX4) mRNA, complete cds. | Gallus gallus | 37,917 | 9-Jun-98 |
| | | GB_EST5: H85635 | 533 | H85635 | ys88c04.r1 Soares retina N2b5HR Homo sapiens cDNA clone IMAGE: 221862 5′, | Homo sapiens | 36,735 | 14-Nov-95 |
| | | | | | mRNA sequence. | | | |
| | | GB_EST35: AI829867 | 427 | AI829867 | wj58c05.x1 NCI_CGAP_Lu19 Homo sapiens cDNA clone IMAGE: | Homo sapiens | 40,299 | 26-Aug-99 |
| | | | | | 2407016 3′, mRNA sequence. | | | |
| rxa01711 | 1281 | GB_GSS10: AQ217798 | 441 | AQ217798 | HS_2007_A1_A04_MR CIT Approved | Homo sapiens | 38,292 | 19-Sep-98 |
| | | | | | Human Genomic Sperm Library D Homo sapiens genomic clone Plate = 2007 Col = 7 | | | |
| | | | | | Row = A, genomic survey sequence. | | | |
| | | GB_PAT: E05055 | 2053 | E05055 | DNA encoding D-threonine aldolase(DTA). | Xanthomonas oryzae | 36,475 | 29-Sep-97 |
| | | GB_PR3: HSJ570L12 | 143508 | AL049589 | Human DNA sequence from clone 570L12 on chromosome Xq13.1-21.1. Contains the | Homo sapiens | 36,262 | 23-Nov-99 |
| | | | | | PGK1 gene for phosphoglycerate kinase 1, the gene for a novel protein similar | | | |
| | | | | | to TAF2G (TATA box binding protein (TBP)-associated factor, RNA polymerase II, | | | |
| | | | | | G, 32 kD) (TAFII31)), ESTs, STS, GSSs and a putative CpG island, | | | |
| | | | | | complete sequence. | | | |
| rxa01714 | | | | | | | | |
| rxa01715 | 819 | GB_BA1: MTCY441 | 35187 | Z80225 | Mycobacterium tuberculosis H37Rv complete genome; segment 118/162. | Mycobacterium | 36,216 | 18-Jun-98 |
| | | | | | | tuberculosis | | |
| | | GB_BA1: SC1B5 | 14866 | AL023517 | Streptomyces coelicolor cosmid 1B5. | Streptomyces coelicolor | 56,807 | 11-MAY-1998 |
| | | GB_BA1: MSGB1912CS | 38503 | L01536 | M. leprae genomic dna sequence, cosmid b1912. | Mycobacterium leprae | 55,651 | 14-Jun-96 |
| rxa01729 | 642 | GB_BA2: CORCSLYS | 2821 | M89931 | Corynebacterium glutamicum beta C-S lyase (aecD) and branched-chain | Corynebacterium | 41,993 | 4-Jun-98 |
| | | | | | amino acid uptake carrier (brnQ) genes, complete cds, and hypothetical protein | glutamicum | | |
| | | | | | Yhbw (yhbw) gene, partial cds. | | | |
| | | GB_HTG4: AC010037 | 166249 | AC010037 | Drosophila melanogaster chromosome 3L/66B6 clone RPCI98-6E4, | Drosophila melanogaster | 34,951 | 16-OCT-1999 |
| | | | | | *** SEQUENCING IN PROGRESS ***, 52 unordered pieces. | | | |
| | | GB_HTG4: AC010037 | 166249 | AC010037 | Drosophila melanogaster chromosome 3L/66B6 clone RPCI98-6E4, | Drosophila melanogaster | 34,951 | 16-OCT-1999 |
| | | | | | *** SEQUENCING IN PROGRESS ***, 52 unordered pieces. | | | |
| rxa01731 | 822 | GB_GSS3: B83621 | 616 | B83621 | RPCI11-16H17.TPB RPCI-11 Homo sapiens genomic clone RPCI-11-16H17, | Homo sapiens | 40,899 | 9-Apr-99 |
| | | | | | genomic survey sequence. | | | |
| | | GB_GSS3: B82563 | 586 | B82563 | RPCI11-16N17.TP RPCI-11 Homo sapiens genomic clone RPCI-11-16N17, | Homo sapiens | 40,235 | 9-Apr-99 |
| | | | | | genomic survey sequence. | | | |
| | | GB_HTG3: AC009074 | 45999 | AC009074 | Homo sapiens chromosome 16 clone RPCI-11_323C21, *** SEQUENCING IN | Homo sapiens | 36,783 | 3-Aug-99 |
| | | | | | PROGRESS ***, 27 unordered pieces. | | | |
| rxa01734 | 657 | GB_GSS14: AQ545618 | 327 | AQ545618 | CITBI-E1-2636O13.TR CITBI-E1 Homo sapiens genomic clone 2636O13, | Homo sapiens | 38,154 | 28-MAY-1999 |
| | | | | | genomic survey sequence. | | | |
| | | GB_HTG2: AC006629 | 27659 | AC006629 | Caenorhabditis elegans clone F12E12, *** SEQUENCING IN PROGRESS***, | Caenorhabditis elegans | 35,658 | 23-Feb-99 |
| | | | | | 1 unordered pieces. | | | |
| | | GB_HTG2: AC006629 | 27659 | AC006629 | Caenorhabditis elegans clone F12E12, *** SEQUENCING IN PROGRESS ***, | Caenorhabditis elegans | 35,714 | 23-Feb-99 |
| | | | | | 1 unordered pieces. | | | |
| rxa01738 | 837 | GB_HTG1: CNS01DSB | 222193 | AL121768 | Homo sapiens chromosome 14 clone R-976B16, *** SEQUENCING IN | Homo sapiens | 36,978 | 05-OCT-1999 |
| | | | | | PROGRESS ***, in ordered pieces. | | | |
| | | GB_HTG1: CNS01DSB | 222193 | AL121768 | Homo sapiens chromosome 14 clone R-976B16, *** SEQUENCING IN | Homo sapiens | 36,978 | 05-OCT-1999 |
| | | | | | PROGRESS ***, in ordered pieces. | | | |
| | | GB_HTG5: AC011170 | 171788 | AC011170 | Homo sapiens clone 10_L_13, *** SEQUENCING IN PROGRESS ***, | Homo sapiens | 35,259 | 5-Nov-99 |
| | | | | | 14 unordered pieces. | | | |
| rxa01741 | 921 | GB_IN1: CEK04G11 | 34190 | Z78544 | Caenorhabditis elegans cosmid K04G11, complete sequence. | Caenorhabditis elegans | 35,055 | 6-Sep-99 |
| | | GB_HTG2: AC005995 | 170023 | AC005995 | Homo sapiens clone DJ0042M02, *** SEQUENCING IN PROGRESS ***, | Homo sapiens | 33,624 | 23-Apr-99 |
| | | | | | 13 unordered pieces. | | | |
| | | GB_HTG2: AC005995 | 170023 | AC005995 | Homo sapiens clone DJ0042M02, *** SEQUENCING IN PROGRESS ***, | Homo sapiens | 33,624 | 23-Apr-99 |
| | | | | | 13 unordered pieces. | | | |
| rxa01742 | 627 | GB_EST30: AI658116 | 497 | AI658116 | fc22e07.y1 Zebrafish WashU MPIMG EST Danio rerio cDNA 5′ similar | Danio rerio | 35,604 | 06-MAY-1999 |
| | | | | | to TR: Q15883 Q15883 X104.;, mRNA sequence. | | | |
| | | GB_HTG1: CEY60A9 | 275370 | AL022281 | Caenorhabditis elegans chromosome X clone Y60A9, *** SEQUENCING IN | Caenorhabditis elegans | 35,610 | 2-Sep-99 |
| | | | | | PROGRESS ***, in unordered pieces. | | | |
| | | GB_HTG1: CEY60A9 | 275370 | AL022281 | Caenorhabditis elegans chromosome X clone Y60A9, *** SEQUENCING IN | Caenorhabditis elegans | 35,610 | 2-Sep-99 |
| | | | | | PROGRESS ***, in unordered pieces. | | | |
| rxa01748 | 903 | GB_GSS13: AQ447364 | 439 | AQ447364 | mgxb0006N01r CUGI Rice Blast BAC Library Magnaporthe grisea genomic | Magnaporthe grisea | 34,889 | 8-Apr-99 |
| | | | | | clone mgxb0006N01r, genomic survey sequence. | | | |
| | | GB_PR2: HSJ247G22 | 120487 | AL096866 | Human DNA sequence from clone RP1-247G22 on chromosome 6p12.2-21.2, | Homo sapiens | 39,310 | 22-Nov-99 |
| | | | | | complete sequence. | | | |
| | | GB_GSS5: AQ811603 | 375 | AQ811603 | HS_5460_B1_C09_SP6E RPCI-11 Human Male BAC | Homo sapiens | 38,133 | 25-Aug-99 |
| | | | | | Library Homo sapiens genomic clone Plate = 1036 Col = 17 | | | |
| | | | | | Row = F, genomic survey sequence. | | | |
| rxa01749 | 1740 | GB_HTG5: AC009544 | 211057 | AC009544 | Homo sapiens chromosome 11 clone RP11-85D24 map 11, WORKING | Homo sapiens | 37,433 | 19-Nov-99 |
| | | | | | DRAFT SEQUENCE, 14 unordered pieces. | | | |
| | | GB_HTG5: AC009544 | 211057 | AC009544 | Homo sapiens chromosome 11 clone RP11-85D24 map 11, WORKING DRAFT | Homo sapiens | 37,069 | 19-Nov-99 |
| | | | | | SEQUENCE, 14 unordered pieces. | | | |
| rxa01750 | | | | | | | | |
| rxa01752 | 1584 | GB_PR1: HUMPROFILX | 17630 | M96943 | Human profilaggrin gene exons 1-3, 5′ end. | Homo sapiens | 36,352 | 27-Apr-93 |
| | | GB_PL2: AF049174 | 535 | AF049174 | Tolypocladium inflatum NRRL 28024 28S ribosomal RNA gene, partial sequence. | Tolypocladium inflatum | 40,187 | 03-MAR-1999 |
| | | GB_BA1: MLCL458 | 43839 | AL049478 | Mycobacterium leprae cosmid L458. | Mycobacterium leprae | 40,322 | 27-Aug-99 |
| rxa01753 | 1662 | GB_PR1: HUMPROFILX | 17630 | M96943 | Human profilaggrin gene exons 1-3, 5′ end. | Homo sapiens | 36,794 | 27-Apr-93 |
| | | GB_PL1: YSCFBPA | 2202 | J03207 | S. cerevisiae fructose-1,6-bisphosphatase (FBP) gene, complete cds. | Saccharomyces cerevisiae | 37,762 | 27-Apr-93 |
| | | GB_PL2: YSCL8039 | 31806 | U19103 | Saccharomyces cerevisiae chromosome XII cosmid 8039. | Saccharomyces cerevisiae | 37,685 | 22-Aug-97 |
| rxa01754 | | | | | | | | |
| rxa01760 | 405 | GB_IN1: CELF43C9 | 34037 | U40427 | Caenorhabditis elegans cosmid F43C9. | Caenorhabditis elegans | 40,945 | 16-Nov-95 |
| | | GB_IN1: CELF43C9 | 34037 | U40427 | Caenorhabditis elegans cosmid F43C9. | Caenorhabditis elegans | 35,484 | 16-Nov-95 |
| | | GB_RO: MUSOP5F | 3405 | D14816 | Mouse osteopontin gene, 5′ flanking region. | Mus musculus | 35,264 | 4-Feb-99 |
| rxa01761 | 4587 | GB_PR4: AC004600 | 133863 | AC004600 | Homo sapiens Chromosome 15q11-q13 PAC clone pDJ373b1 | Homo sapiens | 37,037 | 11-MAR-1999 |
| | | | | | containing Angelman Syndrome gene (UBE3A), complete sequence. | | | |
| | | GB_PR3: AC004259 | 118684 | AC004259 | Human Chromosome 15q11-q13 PAC clone pDJ14i12 containing Angelman | Homo sapiens | 37,037 | 3-Jun-98 |
| | | | | | Syndrome gene (UBE3A), complete sequence. | | | |
| | | GB_PR4: AC004600 | 133863 | AC004600 | Homo sapiens Chromosome 15q11-q13 PAC clone pDJ373b1 containing Angelman | Homo sapiens | 35,995 | 11-MAR-1999 |
| | | | | | Syndrome gene (UBE3A), complete sequence. | | | |
| rxa01765 | 1065 | GB_EST31: AI694883 | 370 | AI694883 | we52h02.x1 NCI_CGAP_Co3 Homo sapiens cDNA | Homo sapiens | 39,566 | 3-Jun-99 |
| | | | | | clone IMAGE: 2344755 3′, mRNA sequence. | | | |
| | | GB_EST6: W08057 | 341 | W08057 | mb37e05.r1 Soares mouse p3NMF19.5 Mus musculus cDNA clone IMAGE: | Mus musculus | 37,353 | 5-Sep-96 |
| | | | | | 331616 5′ similar to gb: Z23090 HEAT SHOCK 27 KD PROTEIN (HUMAN); | | | |
| | | | | | gb: L11609 Mus musculus heat shock protein 25 (MOUSE);, mRNA sequence. | | | |
| | | GB_IN1: CELC39D10 | 40897 | U39678 | Caenorhabditis elegans cosmid C39D10. | Caenorhabditis elegans | 39,590 | 2-Nov-95 |
| rxa01767 | 588 | GB_IN1: CEF16H9 | 21721 | Z50005 | Caenorhabditis elegans cosmid F16H9, complete sequence. | Caenorhabditis elegans | 36,667 | 2-Sep-99 |
| | | GB_IN1: CECC4 | 32063 | Z81490 | Caenorhabditis elegans cosmid CC4, complete sequence. | Caenorhabditis elegans | 35,094 | 2-Sep-99 |
| | | GB_HTG1: CEY26D4 | 156152 | AL022595 | Caenorhabditis elegans chromosome I clone Y26D4, *** SEQUENCING IN | Caenorhabditis elegans | 33,276 | 7-Sep-99 |
| | | | | | PROGRESS ***, in unordered pieces. | | | |
| rxa01768 | | | | | | | | |
| rxa01769 | 564 | GB_HTG4: AC010034 | 130818 | AC010034 | Drosophila melanogaster clone RPCI98-4O3, *** SEQUENCING IN | Drosophila melanogaster | 35,740 | 16-OCT-1999 |
| | | | | | PROGRESS ***, 63 unordered pieces. | | | |
| | | GB_HTG4: AC010034 | 130818 | AC010034 | Drosophila melanogaster clone RPCI98-4O3, *** SEQUENCING IN | Drosophila melanogaster | 35,740 | 16-OCT-1999 |
| | | | | | PROGRESS ***, 63 unordered pieces. | | | |
| | | GB_EST1: D36647 | 360 | D36647 | CELK035EZF Yuji Kohara unpublished cDNA Caenorhabditis elegans cDNA clone | Caenorhabditis elegans | 37,870 | 8-Aug-94 |
| | | | | | yk35e12 5′, mRNA sequence. | | | |
| rxa01770 | 3888 | GB_IN1: SUSENDO16C | 4692 | L34680 | Strongylocentrotus purpuratus calcium-binding protein (endo16) | Strongylocentrotus | 39,337 | 21-Jul-94 |
| | | | | | mRNA, complete cds. | purpuratus | | |
| | | GB_EST31: AF121176 | 535 | AF121176 | AF121176 Homo sapiens liver (Chang L-Y) Homo sapiens cDNA clone | Homo sapiens | 39,626 | 24-MAY-1999 |
| | | | | | PFTTA2-2, mRNA sequence. | | | |
| | | GB_PR1: AB011149 | 5134 | AB011149 | Homo sapiens mRNA for KIAA0577 protein, complete cds. | Homo sapiens | 38,279 | 10-Apr-98 |
| rxa01771 | 825 | GB_BA1: CGPROPGEN | 2936 | Y12537 | C. glutamicum proP gene. | Corynebacterium | 100,000 | 17-Nov-98 |
| | | | | | | glutamicum | | |
| | | GB_EST33: AI778471 | 545 | AI778471 | EST259350 tomato susceptible, Cornell Lycopersicon esculentum cDNA clone | Lycopersicon esculentum | 41,187 | 29-Jun-99 |
| | | | | | cLES5M16, mRNA sequence. | | | |
| | | GB_IN1: CET11F9 | 37714 | Z74042 | Caenorhabditis elegans cosmid T11F9, complete sequence. | Caenorhabditis elegans | 38,077 | 23-Nov-98 |
| rxa01773 | 600 | GB_HTG2: U82212 | 46387 | U82212 | Homo sapiens chromosome 10 clone | Homo sapiens | 42,142 | 09-DEC-1998 |
| | | | | | LA10NC01_23_C_3 map 10q26.1-10q26.2, | | | |
| | | | | | *** SEQUENCING IN PROGRESS ***, 1 ordered pieces. | | | |
| | | GB_HTG2: U82212 | 46387 | U82212 | Homo sapiens chromosome 10 clone LA10NC01_23_C_3 map | Homo sapiens | 42,142 | 09-DEC-1998 |
| | | | | | 10q26.1-10q26.2, *** SEQUENCING IN PROGRESS ***, 1 ordered pieces. | | | |
| | | GB_HTG2: U82212 | 46387 | U82212 | Homo sapiens chromosome 10 clone LA10NC01_23_C_3 map | Homo sapiens | 37,748 | 09-DEC-1998 |
| | | | | | 10q26.1-10q26.2, *** SEQUENCING IN PROGRESS ***, 1 ordered pieces. | | | |
| rxa01774 | 849 | GB_HTG1: HSA557H15 | 228174 | AL078590 | Homo sapiens chromosome 6 clone RP11-557H15, *** SEQUENCING IN | Homo sapiens | 38,054 | 23-Nov-99 |
| | | | | | PROGRESS ***, in unordered pieces. | | | |
| | | GB_HTG1: HSA557H15 | 228174 | AL078590 | Homo sapiens chromosome 6 clone RP11-557H15, *** SEQUENCING IN | Homo sapiens | 38,054 | 23-Nov-99 |
| | | | | | PROGRESS ***, in unordered pieces. | | | |
| | | GB_PL2: YSCH9998 | 35600 | U00030 | Saccharomyces cerevisiae chromosome VIII cosmid 9998. | Saccharomyces cerevisiae | 39,110 | 2-Sep-97 |
| rxa01775 | 687 | GB_PR3: HS37J18 | 131427 | Z98747 | Human DNA sequence from clone 37J18 on chromosome 1p36.2-36.3. | Homo sapiens | 35,036 | 23-Nov-99 |
| | | | | | Contains a putative novel gene, ESTs and GSSs, complete sequence. | | | |
| | | GB_HTG2: AC007475 | 185087 | AC007475 | Drosophila melanogaster chromosome 2 clone BACR04E21 (D592) RPCI-98 | Drosophila melanogaster | 37,333 | 2-Aug-99 |
| | | | | | 04.E.21 map 49A-49B strain y; cn bw sp, *** SEQUENCING IN PROGRESS ***, | | | |
| | | | | | 36 unordered pieces. | | | |
| | | GB_HTG2: AC007475 | 185087 | AC007475 | Drosophila melanogaster chromosome 2 clone BACR04E21 (D592) RPCI-98 | Drosophila melanogaster | 37,333 | 2-Aug-99 |
| | | | | | 04.E.21 map 49A-49B strain y; cn bw sp, *** SEQUENCING IN PROGRESS***, | | | |
| | | | | | 36 unordered pieces. | | | |
| rxa01776 | 1575 | GB_GSS10: AQ174954 | 416 | AQ174954 | HS_3211_B2_C03_MR CIT Approved | Homo sapiens | 43,171 | 17-OCT-1998 |
| | | | | | Human Genomic Sperm Library D Homo sapiens genomic clone Plate = 3211 Col = 6 | | | |
| | | | | | Row = F, genomic survey sequence. | | | |
| | | GB_PR1: HSFGF6 | 1032 | X57075 | H. sapiens FGF6 gene. | Homo sapiens | 41,196 | 15-Feb-95 |
| | | GB_PR2: HSAC000055 | 93578 | AC000055 | Human PAC clone DJ073F11 from Xq23, complete sequence. | Homo sapiens | 35,080 | 14-Nov-96 |
| rxa01777 | 582 | GB_BA2: AF076997 | 15398 | AF076997 | Comamonas testosteroni PtL5 cryptic plasmid pPT1, complete sequence. | Comamonas testosteroni | 37,805 | 30-Nov-99 |
| | | GB_BA2: AF076997 | 15398 | AF076997 | Comamonas testosteroni PtL5 cryptic plasmid pPT1, complete sequence. | Comamonas testosteroni | 35,529 | 30-Nov-99 |
| rxa01778 | 1260 | GB_PR3: AC002981 | 153568 | AC002981 | Homo sapiens Xp22 BAC GS279A12 (Genome Systems) complete sequence. | Homo sapiens | 37,305 | 22-Jan-98 |
| | | GB_EST29: AI587176 | 384 | AI587176 | tr54c10.x1 NCI_CGAP_Pan1 Homo sapiens cDNA clone IMAGE: | Homo sapiens | 37,240 | 14-MAY-1999 |
| | | | | | 2222130 3′, mRNA sequence. | | | |
| | | GB_PR1: HSCP450 | 1346 | X65962 | H. sapiens mRNA for cytochrome P-450. | Homo sapiens | 38,908 | 29-MAY-1992 |
| rxa01779 | 1542 | GB_EST19: AA202518 | 661 | AA202518 | LD02757.5prime LD Drosophila melanogaster embryo BlueScript | Drosophila melanogaster | 40,212 | 27-Nov-98 |
| | | | | | Drosophila melanogaster cDNA clone LD02757 5prime, mRNA sequence. | | | |
| | | GB_EST34: AI805834 | 453 | AI805834 | te52b03.x1 Soares_NFL_T_GBC_S1 | Homo sapiens | 38,000 | 7-Jul-99 |
| | | | | | Homo sapiens cDNA clone IMAGE: 2090285 3′ similar to contains | | | |
| | | | | | Alu repetitive element;, mRNA sequence. | | | |
| | | GB_EST30: AI648920 | 754 | AI648920 | uk32h03.x1 Sugano mouse kidney mkia Mus musculus cDNA clone IMAGE: | Mus musculus | 36,967 | 30-Apr-99 |
| | | | | | 1970741 3′ similar to WP: Y76A2B.5 CE19277;, mRNA sequence. | | | |
| rxa01780 | 498 | GB_GSS8: AQ038759 | 670 | AQ038759 | CIT-HSP-2325O13.TV CIT-HSP Homo sapiens genomic clone 2325O13, | Homo sapiens | 32,645 | 11-Jul-98 |
| | | | | | genomic survey sequence. | | | |
| | | GB_GSS8: AQ038759 | 670 | AQ038759 | CIT-HSP-2325O13.TV CIT-HSP Homo sapiens genomic clone 2325O13, | Homo sapiens | 39,474 | 11-Jul-98 |
| | | | | | genomic survey sequence. | | | |
| rxa01781 | 384 | GB_IN1: CELF52G3 | 42696 | AF026212 | Caenorhabditis elegans cosmid F52G3. | Caenorhabditis elegans | 39,314 | 25-Sep-97 |
| | | GB_GSS14: AQ579313 | 877 | AQ579313 | nbxb0084O07r CUGI Rice BAC Library Oryza sativa genomic clone nbxb0084O07r, | Oryza sativa | 36,053 | 2-Jun-99 |
| | | | | | genomic survey sequence. | | | |
| | | GB_VI: HAV19AE3 | 3441 | X95259 | Human adenovirus type 19a early region 3 genes. | Human adenovirus type | 38,624 | 9-Jul-97 |
| | | | | | | 19a | | |
| rxa01782 | 519 | GB_IN1: DMSED5 | 930 | X78219 | D. melanogaster (Barton) SED5 mRNA. | Drosophila melanogaster | 38,372 | 21-Apr-95 |
| | | GB_IN2: L49408 | 83527 | L49408 | Drosophila melanogaster DNA sequence (P1 DS02740 (D27)), complete sequence. | Drosophila melanogaster | 35,992 | 17-Jul-98 |
| | | GB_STS: G46002 | 398 | G46002 | Z556_1 Zebrafish AB Danio rerio STS genomic clone Z556 5′, sequence tagged site. | Danio rerio | 33,920 | 23-MAR-1999 |
| rxa01783 | 360 | GB_VI: CITV18420 | 19259 | Y18420 | Citrus tristeza virus complete genome, isolate T385. | Citrus tristeza virus | 41,457 | 6-Apr-99 |
| | | GB_IN1: DMSED5 | 930 | X78219 | D. melanogaster (Barton) SED5 mRNA. | Drosophila melanogaster | 45,802 | 21-Apr-95 |
| | | GB_VI: CTY18368 | 2759 | Y18368 | Citrus tristeza virus defective RNA, strain T411. | Citrus tristeza virus | 41,457 | 6-Apr-99 |
| rxa01785 | 699 | GB_BA2: AF121000 | 19751 | AF121000 | Corynebacterium glutamicum strain 22243 R-plasmid pAG1, complete sequence. | Corynebacterium | 40,529 | 14-Apr-99 |
| | | | | | | glutamicum | | |
| | | GB_PR2: HS1014D13 | 71263 | AL022311 | Human DNA sequence from clone 1014D13 on chromosome 22q13.1-13.2 Contains | Homo sapiens | 35,362 | 23-Nov-99 |
| | | | | | ESTs, STSs, and a CpG island, complete sequence. | | | |
| | | GB_BA2: AF121000 | 19751 | AF121000 | Corynebacterium glutamicum strain 22243 R-plasmid pAG1, complete sequence. | Corynebacterium | 38,012 | 14-Apr-99 |
| | | | | | | glutamicum | | |
| rxa01787 | 816 | GB_RO: RATSIALYLA | 1128 | L13445 | Rat sialyltransferase gene family related mRNA, complete cds. | Rattus norvegicus | 35,012 | 26-Jul-93 |
| | | GB_PR3: HSN75H12 | 46144 | Z84496 | Human DNA sequence from cosmid N75H12 on chromosome 22q12-qter. | Homo sapiens | 37,738 | 23-Nov-99 |
| | | GB_GSS13: AQ496514 | 532 | AQ496514 | HS_5118_B2_F05_SP6E RPCI-11 Human Male BAC | Homo sapiens | 39,238 | 28-Apr-99 |
| | | | | | Library Homo sapiens genomic clone Plate = 694 Col = 10 Row = L, | | | |
| | | | | | genomic survey sequence. | | | |
| rxa01788 | | | | | | | | |
| rxa01789 | 765 | GB_BA1: MTV029 | 3279 | AL021427 | Mycobacterium tuberculosis H37Rv complete genome; segment 1/162. | Mycobacterium | 39,229 | 17-Jun-98 |
| | | | | | | tuberculosis | | |
| | | GB_BA1: MTORIREP | 8400 | X92504 | M. tuberculosis origin of replication and genes rnpA, rpmH, dnaA, dnaN, recF. | Mycobacterium | 36,328 | 26-Aug-97 |
| | | | | | | tuberculosis | | |
| | | GB_GSS4: AQ729452 | 763 | AQ729452 | HS_5474_A1_G07_T7AHS_5474_A1 | Homo sapiens | 39,451 | 15-Jul-99 |
| | | | | | RPCI-11 Human Male BAC Library Homo sapiens genomic clone Plate = 1050 | | | |
| | | | | | Col = 13 Row = M, genomic survey sequence. | | | |
| rxa01790 | 183 | GB_EST37: AI935426 | 436 | AI935426 | wo84d02.x1 NCI_CGAP_Kid11 Homo sapiens cDNA | Homo sapiens | 39,877 | 2-Sep-99 |
| | | | | | clone IMAGE: 2462019 3′ similar to TR: O00193 O00193 SMALL ACIDIC | | | |
| | | | | | PROTEIN.;, mRNA sequence. | | | |
| | | GB_GSS11: AQ265301 | 621 | AQ265301 | CITBI-E1-2509K16.TF CITBI-E1 Homo sapiens genomic clone 2509K16, genomic | Homo sapiens | 45,856 | 27-OCT-1998 |
| | | | | | survey sequence. | | | |
| | | GB_HTG2: AC007596 | 199300 | AC007596 | Homo sapiens chromosome 16 clone 116B6, *** SEQUENCING IN | Homo sapiens | 37,572 | 20-MAY-1999 |
| | | | | | PROGRESS ***, 42 unordered pieces. | | | |
| rxa01791 | 486 | GB_PL2: ATAC004521 | 104797 | AC004521 | Arabidopsis thaliana chromosome II BAC F4I1 genomic sequence, | Arabidopsis thaliana | 43,167 | 12-MAY-1998 |
| | | | | | complete sequence. | | | |
| | | GB_GSS13: AQ436125 | 508 | AQ436125 | HS_5049_B2_G12_T7A RPCI-11 Human Male BAC | Homo sapiens | 32,762 | 31-MAR-1999 |
| | | | | | Library Homo sapiens genomic clone Plate = 625 Col = 24 Row = N, | | | |
| | | | | | genomic survey sequence. | | | |
| | | GB_GSS12: AQ342410 | 674 | AQ342410 | RPCI11-121E5.TJ RPCI-11 Homo sapiens genomic clone RPCI-11-121E5, | Homo sapiens | 37,269 | 06-MAY-1999 |
| | | | | | genomic survey sequence. | | | |
| rxa01792 | 396 | GB_STS: KLAJ9905 | 178 | AJ229905 | Kluyveromyces lactis DNA fragment for sequence tagged site, clone okam5e06r. | Kluyveromyces lactis | 42,697 | 20-Nov-98 |
| | | GB_STS: KLAJ9905 | 178 | AJ229905 | Kluyveromyces lactis DNA fragment for sequence tagged site, clone okam5e06r. | Kluyveromyces lactis | 42,697 | 20-Nov-98 |
| | | GB_GSS15: AQ612295 | 472 | AQ612295 | HS_5121_A2_D09_SP6E RPCI-11 Human Male BAC | Homo sapiens | 40,885 | 15-Jun-99 |
| | | | | | Library Homo sapiens genomic clone Plate = 697 Col = 18 Row = G, | | | |
| | | | | | genomic survey sequence. | | | |
| rxa01793 | 357 | GB_GSS3: B82515 | 613 | B82515 | RPCI11-16J10.TV RPCI-11 Homo sapiens genomic clone RPCI-11-16J10, | Homo sapiens | 40,164 | 9-Apr-99 |
| | | | | | genomic survey sequence. | | | |
| | | GB_PR2: CNS0000B | 196287 | AL049829 | Human chromosome 14 DNA sequence *** IN PROGRESS *** BAC R-124D2 | Homo sapiens | 33,621 | 27-OCT-1999 |
| | | | | | of RPCI-11 library from chromosome 14 of Homo sapiens (Human), | | | |
| | | | | | complete sequence. | | | |
| | | GB_OV: AF001393 | 4329 | AF001393 | Oryzias latipes Medaka OG-12 (MOG-12) mRNA, complete cds. | Oryzias latipes | 35,511 | 30-Sep-99 |
| rxa01794 | 357 | GB_GSS15: AQ644157 | 665 | AQ644157 | RPCI93-Dpnll-29O12.TV RPCI93-Dpnll Trypanosoma brucei genomic clone | Trypanosoma brucei | 39,894 | 8-Jul-99 |
| | | | | | RPCI93-Dpnll-29O12, genomic survey sequence. | | | |
| | | GB_GSS15: AQ657704 | 665 | AQ657704 | Sheared DNA-24C24.TR Sheared DNA Trypanosoma brucei genomic clone Sheared | Trypanosoma brucei | 37,110 | 23-Jun-99 |
| | | | | | DNA-24C24, genomic survey sequence. | | | |
| | | GB_OV: GGU25125 | 6418 | U25125 | Gallus gallus preprogastrin gene, complete cds. | Gallus gallus | 40,584 | 06-MAY-1995 |
| rxa01796 | 897 | GB_PR3: HS404G5 | 119737 | AL035695 | Human DNA sequence from clone 404G5 on chromosome 6q24.1-25.2. | Homo sapiens | 34,793 | 23-Nov-99 |
| | | | | | Contains part of a human estrogen receptor gene, STSs and GSSs, complete sequence. | | | |
| | | GB_PR1: HSPTP1CHG | 8545 | X82818 | H. sapiens PTP1C/HCP gene. | Homo sapiens | 35,531 | 26-Jun-97 |
| | | GB_PR3: HS404G5 | 119737 | AL035695 | Human DNA sequence from clone 404G5 on chromosome 6q24.1-25.2. Contains part | Homo sapiens | 37,058 | 23-Nov-99 |
| | | | | | of a human estrogen receptor gene, STSs and GSSs, complete sequence. | | | |
| rxa01799 | 1317 | GB_HTG3: AC010869 | 38000 | AC010869 | Leishmania major chromosome 35 clone L7195 strain Friedlin, | Leishmania major | 40,522 | 02-OCT-1999 |
| | | | | | *** SEQUENCING IN PROGRESS ***, 4 unordered pieces. | | | |
| | | GB_HTG3: AC010869 | 38000 | AC010869 | Leishmania major chromosome 35 clone L7195 strain Friedlin, | Leishmania major | 40,522 | 02-OCT-1999 |
| | | | | | *** SEQUENCING IN PROGRESS ***, 4 unordered pieces. | | | |
| | | GB_OM: SSU12574 | 2190 | U12574 | Sus scrofa myogenic regulatory factor MyoD (myoD) gene, complete cds. | Sus scrofa | 37,068 | 10-Feb-96 |
| rxa01800 | 843 | GB_PH: C2PVCG | 22172 | L48605 | Bacteriophage c2 complete genome. | Lactococcus bacteriophage | 36,747 | 14-MAR-1996 |
| | | | | | | c2 | | |
| | | GB_EST38: AW066009 | 641 | AW066009 | 687004F08.y1 687 - Early embryo from Delaware Zea mays cDNA, | Zea mays | 40,000 | 12-OCT-1999 |
| | | | | | mRNA sequence. | | | |
| | | GB_PH: C2PVCG | 22172 | L48605 | Bacteriophage c2 complete genome. | Lactococcus bacteriophage | 36,867 | 14-MAR-1996 |
| | | | | | | c2 | | |
| rxa01803 | 1083 | GB_BA2: SCJ1 | 36925 | AL109962 | Streptomyces coelicolor cosmid J1. | Streptomyces coelicolor | 54,267 | 24-Sep-99 |
| | | | | | | A3(2) | | |
| | | GB_BA1: PAU12891 | 4062 | U12891 | Pseudomonas aeruginosa PAO substrain OT684 pyoverdine gene transcriptional | Pseudomonas aeruginosa | 37,841 | 03-OCT-1996 |
| | | | | | regulator PvdS (pvdS) gene, complete cds. | | | |
| | | GB_HTG6: AC010203 | 230460 | AC010203 | Homo sapiens clone RP11-175P13, *** SEQUENCING IN PROGRESS ***, | Homo sapiens | 35,185 | 03-DEC-1999 |
| | | | | | 48 unordered pieces. | | | |
| rxa01804 | 444 | GB_EST24: AI189912 | 784 | AI189912 | qd33e07.x1 Soares_placenta_8to9weeks_2NbHP8to9 W Homo sapiens cDNA clone | Homo sapiens | 40,000 | 28-OCT-1998 |
| | | | | | IMAGE: 1725540 3′ similar to gb: Z23064_cds1 HETEROGENEOUS NUCLEAR | | | |
| | | | | | RIBONUCLEOPROTEIN G (HUMAN);, mRNA sequence. | | | |
| | | GB_EST24: AI189912 | 784 | AI189912 | qd33e07.x1 Soares_placenta_8to9weeks_2NbHP8to9 W Homo sapiens cDNA clone | Homo sapiens | 35,294 | 28-OCT-1998 |
| | | | | | IMAGE: 1725540 3′ similar to gb: Z23064_cds1 HETEROGENEOUS NUCLEAR | | | |
| | | | | | RIBONUCLEOPROTEIN G (HUMAN);, mRNA sequence. | | | |
| rxa01805 | 453 | GB_PR2: HSU73628 | 32289 | U73628 | Human chromosome 11 101h11 cosmid, complete sequence. | Homo sapiens | 36,099 | 19-Jun-97 |
| | | GB_PR2: HSU73628 | 32289 | U73628 | Human chromosome 11 101h11 cosmid, complete sequence. | Homo sapiens | 35,227 | 19-Jun-97 |
| rxa01806 | 603 | GB_IN1: CELK02E7 | 36535 | AF025465 | Caenorhabditis elegans cosmid K02E7. | Caenorhabditis elegans | 37,479 | 23-Sep-97 |
| | | GB_HTG3: AC011217 | 157261 | AC011217 | Homo sapiens clone 7_J_14, LOW-PASS SEQUENCE SAMPLING. | Homo sapiens | 33,333 | 03-OCT-1999J |
| | | GB_HTG3: AC011217 | 157261 | AC011217 | Homo sapiens clone 7_J_14, LOW-PASS SEQUENCE SAMPLING. | Homo sapiens | 33,333 | 03-OCT-1999 |
| rxa01809 | 1299 | GB_HTG3: AC010759 | 155875 | AC010759 | Homo sapiens clone 1_K_15, *** SEQUENCING IN PROGRESS ***, | Homo sapiens | 37,920 | 22-Sep-99 |
| | | | | | 15 unordered pieces. | | | |
| | | GB_HTG3: AC010759 | 155875 | AC010759 | Homo sapiens clone 1_K_15, *** SEQUENCING IN PROGRESS ***, | Homo sapiens | 37,920 | 22-Sep-99 |
| | | | | | 15 unordered pieces. | | | |
| | | GB_HTG2: AC006235 | 190842 | AC006235 | Homo sapiens clone hRPK.520_J_4, *** SEQUENCING IN PROGRESS ***, | Homo sapiens | 36,019 | 17-Jul-99 |
| | | | | | 5 unordered pieces. | | | |
| rxa01813 | 789 | GB_PR4: AC004047 | 134649 | AC004047 | Homo sapiens chromosome 4 clone B150J4 map 4q25, complete sequence. | Homo sapiens | 36,205 | 01-DEC-1998 |
| | | GB_HTG2: HS1012F16 | 74539 | AL080274 | Homo sapiens chromosome 20 clone RP5-1012F16, | Homo sapiens | 35,032 | 03-DEC-1999 |
| | | | | | *** SEQUENCING IN PROGRESS ***, in unordered pieces. | | | |
| | | GB_HTG2: HS1012F16 | 74539 | AL080274 | Homo sapiens chromosome 20 clone RP5-1012F16, *** SEQUENCING | Homo sapiens | 35,032 | 03-DEC-1999 |
| | | | | | IN PROGRESS ***, in unordered pieces. | | | |
| rxa01815 | 915 | GB_PR3: AC005740 | 186780 | AC005740 | Homo sapiens chromosome 5p, BAC clone 50g21 (LBNL H154), complete sequence. | Homo sapiens | 37,315 | 01-OCT-1998 |
| | | GB_HTG3: AC008328 | 114617 | AC008328 | Drosophila melanogaster chromosome 2 clone BACR09A04 (D860) RPCI-98 09.A.4 | Drosophila melanogaster | 30,516 | 6-Aug-99 |
| | | | | | map 28B-28C strain y; cn bw sp, *** SEQUENCING IN PROGRESS ***, | | | |
| | | | | | | 74 unordered pieces. | | |
| | | GB_HTG3: AC008328 | 114617 | AC008328 | Drosophila melanogaster chromosome 2 clone BACR09A04 (D860) RPCI-98 09.A.4 | Drosophila melanogaster | 30,516 | 6-Aug-99 |
| | | | | | map 28B-28C | | | |
| | | | | | strain y; cn bw sp, *** SEQUENCING IN PROGRESS ***, 74 unordered pieces. | | | |
| rxa01816 | 855 | GB_PR3: AC003101 | 208396 | AC003101 | Homo sapiens chromosome 17, clone HRPC41C23, complete sequence. | Homo sapiens | 34,272 | 5-Jun-98 |
| | | GB_EST23: AI144656 | 492 | AI144656 | UI-R-BT0-pl-f-04-0-UI.s1 UI-R-BT0 Rattus norvegicus cDNA clone | Rattus norvegicus | 37,526 | 5-Jul-99 |
| | | | | | UI-R-BT0-pl-f-04-0-UI 3′, mRNA sequence. | | | |
| | | GB_GSS11: AQ341706 | 506 | AQ341706 | RPCI11-120J20.TJ RPCI-11 Homo sapiens genomic clone RPCI-11-120J20, | Homo sapiens | 40,789 | 06-MAY-1999 |
| | | | | | genomic survey sequence. | | | |
| rxa01817 | 756 | GB_BA2: AF030176 | 7000 | AF030176 | Rhodococcus opacus putative transposase gene, partial cds; and putative | Rhodococcus opacus | 42,577 | 5-Aug-98 |
| | | | | | FAD synthetase, putative | | | |
| | | | | | short-chain dehydrogenase/reductase, | | | |
| | | | | | maleylacetate reductase (macA), and putative transcription | | | |
| | | | | | factor genes, complete cds. | | | |
| | | GB_EST19: AA263350 | 423 | AA263350 | LD06495.5prime LD Drosophila melanogaster embryo BlueScript Drosophila | Drosophila melanogaster | 38,955 | 27-Nov-98 |
| | | | | | melanogaster cDNA clone LD06495 5prime, mRNA sequence. | | | |
| | | GB_EST19: AA202194 | 368 | AA202194 | LD02304.5prime LD Drosophila melanogaster embryo BlueScript Drosophila | Drosophila melanogaster | 39,891 | 27-Nov-98 |
| | | | | | melanogaster cDNA clone LD02304 5prime, mRNA sequence. | | | |
| rxa01820 | 1497 | GB_BA2: AF030176 | 7000 | AF030176 | Rhodococcus opacus putative transposase gene, partial | Rhodococcus opacus | 41,799 | 5-Aug-98 |
| | | | | | cds; and putative FAD synthetase, putative | | | |
| | | | | | short-chain dehydrogenase/reductase, | | | |
| | | | | | maleylacetate reductase (macA), and putative transcription | | | |
| | | | | | factor genes, complete cds. | | | |
| | | GB_EST32: AI728582 | 666 | AI728582 | BNLGHi11124 Six-day Cotton fiber Gossypium hirsutum cDNA | Gossypium hirsutum | 37,915 | 11-Jun-99 |
| | | | | | 5′ similar to (U64918) ATGP1 | | | |
| | | | | | [Arabidopsis thaliana], mRNA sequence. | | | |
| | | GB_BA2: AF030176 | 7000 | AF030176 | Rhodococcus opacus putative transposase gene, partial cds; and putative FAD | Rhodococcus opacus | 37,127 | 5-Aug-98 |
| | | | | | synthetase, putative | | | |
| | | | | | short-chain dehydrogenase/reductase, | | | |
| | | | | | maleylacetate reductase (macA), and putative transcription | | | |
| | | | | | factor genes, complete cds. | | | |
| rxa01825 | 393 | GB_HTG1: HSJCF13 | 293368 | AJ239320 | Homo sapiens chromosome X clone cosmid 244B12 map Xq13, *** SEQUENCING | Homo sapiens | 34,748 | 28-Sep-99 |
| | | | | | IN PROGRESS ***, in ordered pieces. | | | |
| | | GB_HTG1: HSJCF13 | 293368 | AJ239320 | Homo sapiens chromosome X clone cosmid 244B12 map Xq13, | Homo sapiens | 34,748 | 28-Sep-99 |
| | | | | | *** SEQUENCING IN PROGRESS ***, in ordered pieces. | | | |
| | | GB_HTG1: AP000568 | 136627 | AP000568 | Homo sapiens chromosome 21 clone B753B2 map 21q21.2, | Homo sapiens | 34,884 | 07-OCT-1999 |
| | | | | | *** SEQUENCING IN PROGRESS ***, in unordered pieces. | | | |
| rxa01831 | 585 | GB_IN2: AF047757 | 408 | AF047757 | Trichogramma australicum internal transcribed spacer 2, complete sequence. | Trichogramma australicum | 38,390 | 10-Jul-98 |
| | | GB_EST18: AA687516 | 513 | AA687516 | ns58h11.r1 NCI_CGAP_Pr22 Homo sapiens cDNA clone IMAGE: 1187877 | Homo sapiens | 35,057 | 11-DEC-1997 |
| | | | | | 5′ similar to gb: X15341 | | | |
| | | | | | CYTOCHROME C OXIDASE POLYPEPTIDE | | | |
| | | | | | VIA-LIVER (HUMAN);, mRNA sequence. | | | |
| | | GB_EST18: AA687516 | 513 | AA687516 | ns58h11.r1 NCI_CGAP_Pr22 Homo sapiens cDNA clone IMAGE: | Homo sapiens | 37,624 | 11-DEC-1997 |
| | | | | | 1187877 5′ similar to gb: X15341 | | | |
| | | | | | CYTOCHROME C OXIDASE POLYPEPTIDE | | | |
| | | | | | VIA-LIVER (HUMAN);, mRNA sequence. | | | |
| rxa01834 | 825 | GB_PL2: T8F5 | 87192 | AC004512 | Arabidopsis thaliana chromosome 1 BAC T8F5 sequence, complete sequence. | Arabidopsis thaliana | 38,101 | 22-Jul-98 |
| | | GB_PR4: AC007677 | 166949 | AC007677 | Homo sapiens clone NH0086N01, complete sequence. | Homo sapiens | 35,888 | 28-Sep-99 |
| | | GB_PR4: AC007677 | 166949 | AC007677 | Homo sapiens clone NH0086N01, complete sequence. | Homo sapiens | 36,906 | 28-Sep-99 |
| rxa01842 | 1041 | GB_HTG3: AC009183 | 145694 | AC009183 | Drosophila melanogaster chromosome 3 clone BACR39F04 (D839) RPCI-98 | Drosophila melanogaster | 40,430 | 16-Sep-99 |
| | | | | | 39.F.4 map 85F-85F | | | |
| | | | | | strain y; cn bw sp, *** SEQUENCING | | | |
| | | | | | IN PROGRESS***, 139 unordered pieces. | | | |
| | | GB_HTG3: AC009183 | 145694 | AC009183 | Drosophila melanogaster chromosome 3 clone BACR39F04 (D839) RPCI-98 39.F.4 | Drosophila melanogaster | 40,430 | 16-Sep-99 |
| | | | | | map 85F-85F | | | |
| | | | | | strain y; cn bw sp, *** SEQUENCING IN PROGRESS ***, 139 unordered pieces. | | | |
| | | GB_HTG5: AC008338 | 136685 | AC008338 | Drosophila melanogaster chromosome X clone BACR30J04 (D908) RPCI-98 | Drosophila melanogaster | 40,527 | 15-Nov-99 |
| | | | | | 30.J.4 map 19C-19E | | | |
| | | | | | strain y; cn bw sp, *** | | | |
| | | | | | SEQUENCING IN PROGRESS ***, 93 unordered pieces. | | | |
| rxa01844 | 303 | GB_HTG2: AC007597 | 163880 | AC007597 | Homo sapiens chromosome 16 clone RPCI-11_137H10, | Homo sapiens | 34,564 | 20-Jul-99 |
| | | | | | *** SEQUENCING IN PROGRESS ***, 3 ordered pieces. | | | |
| | | GB_HTG2: AC007597 | 163880 | AC007597 | Homo sapiens chromosome 16 clone RPCI-11_137H10, *** SEQUENCING | Homo sapiens | 34,564 | 20-Jul-99 |
| | | | | | IN PROGRESS ***, 3 ordered pieces. | | | |
| | | GB_HTG3: AC009998 | 163590 | AC009998 | Homo sapiens chromosome 15 clone BAC 573G7 map 15q24, | Homo sapiens | 40,816 | 10-Sep-99 |
| | | | | | LOW-PASS SEQUENCE SAMPLING. | | | |
| rxa01845 | 531 | GB_OV: AF012348 | 4921 | AF012348 | Gallus gallus smooth muscle gamma actin (gamma actin) gene, complete cds. | Gallus gallus | 37,333 | 17-MAR-1998 |
| | | GB_BA1: D85417 | 7984 | D85417 | Propionibacterium freudenreichii hemY, hemH, hemB, hemX, hemR and hemL genes, | Propionibacterium | 45,243 | 6-Feb-99 |
| | | | | | complete cds. | freudenreichii | | |
| | | GB_BA1: D85417 | 7984 | D85417 | Propionibacterium freudenreichii hemY, hemH, hemB, hemX, hemR and hemL genes, | Propionibacterium | 40,232 | 6-Feb-99 |
| | | | | | complete cds. | freudenreichii | | |
| rxa01846 | 382 | GB_HTG1: HSJ323A24 | 278948 | AL121750 | Homo sapiens chromosome 4 clone RP3-323A24, *** SEQUENCING | Homo sapiens | 34,840 | 23-Nov-99 |
| | | | | | IN PROGRESS ***, in unordered pieces. | | | |
| | | GB_HTG1: HSJ323A24 | 278948 | AL121750 | Homo sapiens chromosome 4 clone RP3-323A24, *** SEQUENCING IN | Homo sapiens | 34,840 | 23-Nov-99 |
| | | | | | PROGRESS ***, in unordered pieces. | | | |
| | | GB_PR2: HS181C9 | 92472 | Z98743 | Human DNA sequence from clone 181C9 on chromosome 22q13.2-13.33.Contains | Homo sapiens | 42,480 | 23-Nov-99 |
| | | | | | a PHAPI2 Leucine Rich Acidic | | | |
| | | | | | Nuclear Protein pseudogene, part of a putative novel gene, ESTs, STSs and | | | |
| | | | | | GSSs, complete sequence. | | | |
| rxa01847 | 858 | GB_PR3: AC004893 | 103738 | AC004893 | Homo sapiens PAC clone DJ0808A01 from 7q21.1-q31.1, complete sequence. | Homo sapiens | 38,321 | 03-OCT-1998 |
| | | GB_HTG4: AC010182_3 | 110000 | AC010182 | Homo sapiens chromosome 12q seeders clone RPCI11-185N2, *** SEQUENCING | Homo sapiens | 36,998 | 15-Sep-99 |
| | | | | | IN PROGRESS ***, 172 unordered pieces. | | | |
| | | GB_HTG4: AC010182_3 | 110000 | AC010182 | Homo sapiens chromosome 12q seeders clone RPCI11-185N2, | Homo sapiens | 36,998 | 15-Sep-99 |
| | | | | | *** SEQUENCING IN PROGRESS ***, 172 unordered pieces. | | | |
| rxa01856 | 669 | GB_GSS15: AQ612487 | 433 | AQ612487 | HS_5122_A1_B07_SP6E RPCI-11 Human Male BAC Library | Homo sapiens | 39,723 | 15-Jun-99 |
| | | | | | Homo sapiens genomic clone | | | |
| | | | | | Plate = 698 Col = 13 | | | |
| | | | | | Row = C, genomic survey sequence. | | | |
| | | GB_PR4: AC005876 | 89817 | AC005876 | citb_188_i_5, complete sequence. | Homo sapiens | 39,567 | 5-Nov-99 |
| | | GB_PR4: AC005876 | 89817 | AC005876 | citb_188_i_5, complete sequence. | Homo sapiens | 36,677 | 5-Nov-99 |
| rxa01857 | 774 | GB_PR3: HS742C19 | 122748 | AL031846 | Human DNA sequence from clone RP4-742C19 on chromosome | Homo sapiens | 33,506 | 29-Nov-99 |
| | | | | | 22, complete sequence. | | | |
| | | GB_PR2: HSJ1100I6 | 161525 | AL110503 | Human DNA sequence from clone RP5-1100I6 on chromosome 20 Contains | Homo sapiens | 37,450 | 22-Nov-99 |
| | | | | | a novel mRNA, GSSs and a CpG Island, complete sequence. | | | |
| | | GB_HTG6: AC009893 | 186769 | AC009893 | Homo sapiens chromosome 8 clone RP11-4P3, *** SEQUENCING IN | Homo sapiens | 37,368 | 23-Nov-99 |
| | | | | | PROGRESS ***, 5 unordered pieces. | | | |
| rxa01858 | | | | | | | | |
| rxa01870 | 798 | GB_RO: AC004155 | 128026 | AC004155 | Mus musculus DNA from BAC 10818 containing the Ercc-4 gene, complete sequence. | Mus musculus | 37,387 | 19-Feb-98 |
| | | GB_RO: AC004155 | 128026 | AC004155 | Mus musculus DNA from BAC 10818 containing the Ercc-4 gene, complete sequence. | Mus musculus | 37,707 | 19-Feb-98 |
| | | GB_BA2: AF144563 | 5971 | AF144563 | Thermobifida fusca beta-1,4-exocellulase E6 precursor (celF) gene, complete cds; | Thermobifida fusca | 38,619 | 21-Jun-99 |
| | | | | | and unknown genes. | | | |
| rxa01871 | 1086 | GB_BA2: AF079304 | 3350 | AF079304 | Eikenella corrodens type IV pilin (pilA1), type IV pilin (pilA2), putative fimbrial | Eikenella corrodens | 40,465 | 15-Jul-99 |
| | | | | | protein (pilB), and | | | |
| | | | | | putative hemagglutinin | | | |
| | | | | | protein (hagA) genes, complete cds. | | | |
| | | GB_BA1: ECECPHAG | 3589 | Z12609 | E. corrodens ecpA and ecpB genes encoding type 4 N-methylphenylalanine pilin and | Eikenella corrodens | 40,517 | 5-Aug-92 |
| | | | | | hag1 gene for hemagglutinin protein. | | | |
| | | GB_BA2: AE001707 | 19518 | AE001707 | Thermotoga maritima section 19 of 136 of the complete genome. | Thermotoga maritima | 38,124 | 2-Jun-99 |
| rxa01874 | 448 | GB_EST6: N51407 | 505 | N51407 | yz17a08.s1 Soares_multiple_sclerosis_2NbHMSP Homo sapiens cDNA clone | Homo sapiens | 35,735 | 14-Feb-96 |
| | | | | | IMAGE: 283286 3′, mRNA sequence. | | | |
| | | GB_EST29: AI619782 | 374 | AI619782 | ty53b03.x1 NCI_CGAP_Ut2 Homo sapiens cDNA clone IMAGE: 2282765 3′, | Homo sapiens | 38,966 | 21-Apr-99 |
| | | | | | mRNA sequence. | | | |
| | | GB_EST36: AI885047 | 466 | AI885047 | wI89a01.x1 NCI_CGAP_Brn25 Homo sapiens cDNA clone IMAGE: 2432040 3′, | Homo sapiens | 37,419 | 1-Sep-99 |
| | | | | | mRNA sequence. | | | |
| rxa01875 | 969 | GB_EST13: AA356276 | 291 | AA356276 | EST64843 Jurkat T-cells VI Homo sapiens cDNA 5′ end, mRNA sequence. | Homo sapiens | 41,667 | 21-Apr-97 |
| | | GB_EST22: AI050653 | 443 | AI050653 | ub38f03.r1 Soares 2NbMT Mus musculus cDNA clone IMAGE: 1380029 5′, | Mus musculus | 38,851 | 9-Jul-98 |
| | | | | | mRNA sequence. | | | |
| | | GB_GSS1: CNS0022Z | 1101 | AL061786 | Drosophila melanogaster genome survey sequence T7 end of | Drosophila melanogaster | 39,039 | 3-Jun-99 |
| | | | | | BAC # BACR05B21 of RPCI-98 | | | |
| | | | | | library from Drosophila melanogaster (fruit fly), genomic survey sequence. | | | |
| rxa01877 | 1194 | GB_HTG4: AC009849 | 114993 | AC009849 | Drosophila melanogaster chromosome 2 clone BACR07H08 (D864) RPCI-98 07.H.8 | Drosophila melanogaster | 37,274 | 25-OCT-1999 |
| | | | | | map 31B-31C | | | |
| | | | | | strain y; cn bw sp, *** SEQUENCING IN | | | |
| | | | | | PROGRESS***, 55 unordered pieces. | | | |
| | | GB_HTG4: AC009849 | 114993 | AC009849 | Drosophila melanogaster chromosome 2 clone BACR07H08 (D864) RPCI-98 | Drosophila melanogaster | 37,274 | 25-OCT-1999 |
| | | | | | 07.H.8 map 31B-31C | | | |
| | | | | | strain y; cn bw sp, | | | |
| | | | | | *** SEQUENCING IN PROGRESS ***, 55 unordered pieces. | | | |
| | | GB_IN2: AC005454 | 84367 | AC005454 | Drosophila melanogaster, chromosome 2R, region 31C1-31D6, P1 clone DS08879, | Drosophila melanogaster | 38,679 | 15-DEC-1998 |
| | | | | | complete sequence. | | | |
| rxa01879 | 1056 | GB_PR2: CNS0000Q | 192932 | AL049874 | Human chromosome 14 DNA sequence *** IN PROGRESS *** BAC R-1042B17 of | Homo sapiens | 37,094 | 7-Jul-99 |
| | | | | | RPCI-11 library | | | |
| | | | | | from chromosome 14 | | | |
| | | | | | of Homo sapiens (Human), complete sequence. | | | |
| | | GB_HTG2: AC006732 | 159453 | AC006732 | Caenorhabditis elegans clone Y32G9, *** SEQUENCING IN PROGRESS ***, | Caenorhabditis elegans | 34,862 | 23-Feb-99 |
| | | | | | 9 unordered pieces. | | | |
| | | GB_HTG2: AC006732 | 159453 | AC006732 | Caenorhabditis elegans clone Y32G9, *** SEQUENCING IN PROGRESS ***, | Caenorhabditis elegans | 34,862 | 23-Feb-99 |
| | | | | | 9 unordered pieces. | | | |
| rxa01896 | 759 | GB_BA1: SC2G5 | 38404 | AL035478 | Streptomyces coelicolor cosmid 2G5. | Streptomyces coelicolor | 38,420 | 11-Jun-99 |
| | | GB_PL1: AP000570 | 157903 | AP000570 | Oryza sativa genomic DNA, chromosome 1, clone: P0711E10. | Oryza sativa | 40,272 | 03-DEC-1999 |
| | | GB_BA1: SC2G5 | 38404 | AL035478 | Streptomyces coelicolor cosmid 2G5. | Streptomyces coelicolor | 40,270 | 11-Jun-99 |
| rxa01899 | 909 | GB_BA1: MTV002 | 56414 | AL008967 | Mycobacterium tuberculosis H37Rv complete genome; segment 122/162. | Mycobacterium | 38,702 | 17-Jun-98 |
| | | | | | | tuberculosis | | |
| | | GB_BA1: MTV002 | 56414 | AL008967 | Mycobacterium tuberculosis H37Rv complete genome; segment 122/162. | Mycobacterium | 38,229 | 17-Jun-98 |
| | | | | | | tuberculosis | | |
| rxa01902 | 1182 | GB_HTG6: AC009893 | 186769 | AC009893 | Homo sapiens chromosome 8 clone RP11-4P3, *** SEQUENCING IN | Homo sapiens | 34,868 | 23-Nov-99 |
| | | | | | PROGRESS ***, 5 unordered pieces. | | | |
| | | GB_OV: D84063 | 2363 | D84063 | Oryzias latipes Bf/C2 mRNA, complete cds. | Oryzias latipes | 38,074 | 6-Feb-99 |
| | | GB_HTG6: AC009893 | 186769 | AC009893 | Homo sapiens chromosome 8 clone RP11-4P3, *** SEQUENCING IN | Homo sapiens | 35,616 | 23-Nov-99 |
| | | | | | PROGRESS ***, 5 unordered pieces. | | | |
| rxa01903 | 302 | GB_BA1: MSGILVB | 4210 | L49392 | Mycobacterium avium acetolactate synthase (ilvBN) and acetohydroxy | Mycobacterium avium | 38,667 | 11-DEC-1996 |
| | | | | | acid isomeroreductase (ilvC) gene, complete cds. | | | |
| | | GB_PR3: AC004833 | 68890 | AC004833 | Homo sapiens PAC clone DJ0547C10 from 7p21-p22, complete sequence. | Homo sapiens | 34,615 | 5-Nov-98 |
| | | GB_PR3: AC004833 | 68890 | AC004833 | Homo sapiens PAC clone DJ0547C10 from 7p21-p22, complete sequence. | Homo sapiens | 42,712 | 5-Nov-98 |
| rxa01904 | 546 | GB_HTG2: AC006740 | 200965 | AC006740 | Caenorhabditis elegans clone Y38B5, *** SEQUENCING IN | Caenorhabditis elegans | 34,074 | 25-Feb-99 |
| | | | | | PROGRESS ***, 12 unordered pieces. | | | |
| | | GB_HTG2: AC006695 | 33622 | AC006695 | Caenorhabditis elegans clone W06H8, *** SEQUENCING IN PROGRESS ***, 1 | Caenorhabditis elegans | 35,556 | 23-Feb-99 |
| | | | | | unordered pieces. | | | |
| | | GB_HTG2: AC006695 | 33622 | AC006695 | Caenorhabditis elegans clone W06H8, *** SEQUENCING IN PROGRESS ***, 1 | Caenorhabditis elegans | 35,556 | 23-Feb-99 |
| | | | | | unordered pieces. | | | |
| rxa01905 | 654 | GB_IN1: CEW04G3 | 32158 | Z68014 | Caenorhabditis elegans cosmid W04G3, complete sequence. | Caenorhabditis elegans | 38,730 | 2-Sep-99 |
| | | GB_PL2: AF067082 | 6947 | AF067082 | Apium graveolens mannitol dehydrogenase (Mtd) gene, complete cds. | Apium graveolens | 38,242 | 30-Sep-98 |
| | | GB_IN1: CEW04G3 | 32158 | Z68014 | Caenorhabditis elegans cosmid W04G3, complete sequence. | Caenorhabditis elegans | 36,834 | 2-Sep-99 |
| rxa01906 | 588 | GB_PL1: AB012242 | 78973 | AB012242 | Arabidopsis thaliana genomic DNA, chromosome 5, TAC clone: K24G6, | Arabidopsis thaliana | 39,071 | 20-Nov-99 |
| | | | | | complete sequence. | | | |
| | | GB_EST6: N49608 | 454 | N49608 | yy58g01.s1 Soares_multiple_sclerosis_2NbHMSP Homo sapiens cDNA clone | Homo sapiens | 43,603 | 14-Feb-96 |
| | | | | | IMAGE: 277776 3′, mRNA sequence. | | | |
| | | GB_EST6: N49609 | 452 | N49609 | yy58g02.s1 Soares_multiple_sclerosis_2NbHMSP Homo sapiens cDNA clone | Homo sapiens | 43,307 | 14-Feb-96 |
| | | | | | IMAGE: 277778 3′, mRNA sequence. | | | |
| rxa01907 | 735 | GB_HTG3: AC009437 | 159691 | AC009437 | Homo sapiens chromosome 11 clone 56_G_09 map 11, *** SEQUENCING IN | Homo sapiens | 36,226 | 22-Aug-99 |
| | | | | | PROGRESS ***, 10 unordered pieces. | | | |
| | | GB_HTG3: AC009437 | 159691 | AC009437 | Homo sapiens chromosome 11 clone 56_G_09 map 11, *** SEQUENCING | Homo sapiens | 36,226 | 22-Aug-99 |
| | | | | | IN PROGRESS ***, 10 unordered pieces. | | | |
| | | GB_HTG3: AC009437 | 159691 | AC009437 | Homo sapiens chromosome 11 clone 56_G_09 map 11, *** SEQUENCING | Homo sapiens | 38,483 | 22-Aug-99 |
| | | | | | IN PROGRESS ***, 10 unordered pieces. | | | |
| rxa01908 | 969 | GB_PR3: HS90G24 | 154414 | AL008723 | Human DNA sequence from clone 90G24 on chromosome 22. Contains the | Homo sapiens | 37,331 | 23-Nov-99 |
| | | | | | RFPL2 gene for RET | | | |
| | | | | | finger protein-like | | | |
| | | | | | 2, an Immunoglobulin Lambda Light Chain C region (IGLC) pseudogene, the gene | | | |
| | | | | | for SAAT1 (low affinity | | | |
| | | | | | sodium glucose cotransporter (sodium: solute symporter family)) and a | | | |
| | | | | | Cleavage and Polyadenylation | | | |
| | | | | | Specific Factor CPSF 160 kD subunit pseudogene. Contains ESTs, | | | |
| | | | | | GSSs and three putative CpG islands, complete sequence. | | | |
| | | GB_EST25: AI316482 | 972 | AI316482 | uj60g12.y1 Sugano mouse liver mlia Mus musculus cDNA clone IMAGE: 1924390 | Mus musculus | 36,800 | 17-DEC-1998 |
| | | | | | 5′ similar to | | | |
| | | | | | gb: M12529 APOLIPOPROTEIN E | | | |
| | | | | | PRECURSOR (HUMAN); gb: D00466 Mouse apolipoprotein E | | | |
| | | | | | gene (MOUSE);, mRNA sequence. | | | |
| | | GB_EST27: AI398904 | 556 | AI398904 | NCW10G7T7 Westergaards Neurospora crassa cDNA clone W10G7 | Neurospora crassa | 38,095 | 8-Feb-99 |
| | | | | | 3′, mRNA sequence. | | | |
| rxa01909 | 970 | GB_HTG1: HSJ658I14 | 133423 | AL109845 | Homo sapiens chromosome 1 clone RP4-658I14, *** SEQUENCING IN | Homo sapiens | 40,520 | 23-Nov-99 |
| | | | | | PROGRESS ***, in unordered pieces. | | | |
| | | GB_HTG1: HSJ658I14 | 133423 | AL109845 | Homo sapiens chromosome 1 clone RP4-658I14, *** SEQUENCING | Homo sapiens | 40,520 | 23-Nov-99 |
| | | | | | IN PROGRESS ***, in unordered pieces. | | | |
| | | GB_HTG1: HSJ658I14 | 133423 | AL109845 | Homo sapiens chromosome 1 clone RP4-658I14, *** SEQUENCING | Homo sapiens | 36,364 | 23-Nov-99 |
| | | | | | IN PROGRESS ***, in unordered pieces. | | | |
| rxa01910 | 969 | GB_PR2: CNS00008 | 218956 | AL049831 | Human chromosome 14 DNA sequence *** IN PROGRESS *** BAC | Homo sapiens | 35,393 | 29-Jun-99 |
| | | | | | R-330O19 of RPCI-11 library | | | |
| | | | | | from chromosome 14 of Homo sapiens (Human), | | | |
| | | | | | complete sequence. | | | |
| | | GB_PR2: CNS00008 | 218956 | AL049831 | Human chromosome 14 DNA sequence *** IN PROGRESS *** BAC R-330O19 of | Homo sapiens | 38,405 | 29-Jun-99 |
| | | | | | RPCI-11 library | | | |
| | | | | | from chromosome 14 of Homo sapiens (Human), complete sequence. | | | |
| | | GB_HTG5: AC009217 | 118561 | AC009217 | Drosophila melanogaster chromosome X clone BACR41N19 (D907) | Drosophila melanogaster | 36,765 | 16-Nov-99 |
| | | | | | RPCI-98 41.N.19 map 19A-19C | | | |
| | | | | | strain y; cn bw sp, *** SEQUENCING IN PROGRESS ***, 78 unordered pieces. | | | |
| rxa01911 | 1062 | GB_HTG2: AC002317 | 94882 | AC002317 | Homo sapiens chromosome 17 clone HCIT7H10 map 17, *** SEQUENCING IN | Homo sapiens | 36,654 | 20-Feb-98 |
| | | | | | PROGRESS ***, 8 unordered pieces. | | | |
| | | GB_HTG2: AC002317 | 94882 | AC002317 | Homo sapiens chromosome 17 clone HCIT7H10 map 17, *** SEQUENCING IN | Homo sapiens | 36,654 | 20-Feb-98 |
| | | | | | PROGRESS ***, 8 unordered pieces. | | | |
| | | GB_HTG2: AC002317 | 94882 | AC002317 | Homo sapiens chromosome 17 clone HCIT7H10 map 17, *** SEQUENCING IN | Homo sapiens | 37,012 | 20-Feb-98 |
| | | | | | PROGRESS ***, 8 unordered pieces. | | | |
| rxa01923 | 873 | GB_HTG2: AC006844 | 299782 | AC006844 | Caenorhabditis elegans clone Y108G3Y, *** SEQUENCING IN | Caenorhabditis elegans | 37,176 | 24-Feb-99 |
| | | | | | PROGRESS***, 4 unordered pieces. | | | |
| | | GB_HTG2: AC006844 | 299782 | AC006844 | Caenorhabditis elegans clone Y108G3Y, *** SEQUENCING IN | Caenorhabditis elegans | 37,176 | 24-Feb-99 |
| | | | | | PROGRESS ***, 4 unordered pieces. | | | |
| | | GB_BA1: ECOUW76 | 225419 | U00039 | E. coli chromosomal region from 76.0 to 81.5 minutes. | Escherichia coli | 38,902 | 7-Nov-96 |
| rxa01930 | 1074 | GB_BA1: CGPAN | 2164 | X96580 | C. glutamicum panB, panC & xylB genes. | Corynebacterium | 100,000 | 11-MAY-1999 |
| | | | | | | glutamicum | | |
| | | GB_HTG2: AC007598 | 248427 | AC007598 | Homo sapiens chromosome 16 clone 165M1, *** SEQUENCING | Homo sapiens | 38,469 | 20-MAY-1999 |
| | | | | | IN PROGRESS ***, 105 unordered pieces. | | | |
| | | GB_HTG2: AC007598 | 248427 | AC007598 | Homo sapiens chromosome 16 clone 165M1, *** SEQUENCING | Homo sapiens | 38,469 | 20-MAY-1999 |
| | | | | | IN PROGRESS ***, 105 unordered pieces. | | | |
| rxa01931 | 777 | GB_IN1: CEH12I19 | 37427 | Z98851 | Caenorhabditis elegans cosmid H12I19, complete sequence. | Caenorhabditis elegans | 32,763 | 18-DEC-1998 |
| | | GB_HTG1: CEY37A1 | 316170 | Z93243 | Caenorhabditis elegans chromosome IV clone Y37A1, *** | Caenorhabditis elegans | 32,763 | 03-DEC-1998 |
| | | | | | SEQUENCING IN PROGRESS ***, in unordered pieces. | | | |
| | | GB_HTG1: CEY37A1 | 316170 | Z93243 | Caenorhabditis elegans chromosome IV clone Y37A1, *** | Caenorhabditis elegans | 32,763 | 03-DEC-1998 |
| | | | | | SEQUENCING IN PROGRESS ***, in unordered pieces. | | | |
| rxa01941 | 558 | GB_EST25: AI313927 | 520 | AI313927 | uj38h06.x1 Sugano mouse kidney mkia Mus musculus cDNA clone IMAGE: | Mus musculus | 41,148 | 17-DEC-1998 |
| | | | | | 1922267 3′ similar to | | | |
| | | | | | TR: O09047 O09047 COMPLEMENT | | | |
| | | | | | COMPONENT 3A RECEPTOR 1;, mRNA sequence. | | | |
| | | GB_RO: AF053757 | 8308 | AF053757 | Mus musculus complement C3a anaphylatoxin receptor (C3ar) gene, complete cds. | Mus musculus | 38,649 | 30-Jul-98 |
| | | GB_RO: MMU77461 | 2657 | U77461 | Mus musculus anaphylatoxin C3a receptor gene, complete cds. | Mus musculus | 38,649 | 28-MAY-1997 |
| rxa01942 | 723 | GB_BA1: BRLPTSG | 3163 | L18875 | Brevibacterium lactofermentum phosphoenolpyruvate sugar | Brevibacterium | 67,407 | 01-OCT-1993 |
| | | | | | phosphotransferase (ptsG) gene, complete cds. | lactofermentum | | |
| | | GB_BA1: CORPTSMA | 2656 | L18874 | Corynebacterium glutamicum phosphoenolpyruvate sugar | Corynebacterium | 100,000 | 24-Nov-94 |
| | | | | | phosphotransferase (ptsM) mRNA, complete cds. | glutamicum | | |
| | | GB_BA1: CORPTSMA | 2656 | L18874 | Corynebacterium glutamicum phosphoenolpyruvate sugar | Corynebacterium | 37,008 | 24-Nov-94 |
| | | | | | phosphotransferase (ptsM) mRNA, complete cds. | glutamicum | | |
| rxa01944 | 1095 | GB_HTG2: AC004840 | 162485 | AC004840 | Homo sapiens clone DJ0607J02, *** SEQUENCING | Homo sapiens | 36,287 | 12-Jun-98 |
| | | | | | IN PROGRESS ***, 12 unordered pieces. | | | |
| | | GB_HTG2: AC004840 | 162485 | AC004840 | Homo sapiens clone DJ0607J02, *** SEQUENCING IN PROGRESS | Homo sapiens | 36,287 | 12-Jun-98 |
| | | | | | ***, 12 unordered pieces. | | | |
| | | GB_VI: MCU60315 | 190289 | U60315 | Molluscum contagiosum virus subtype 1, complete genome. | Molluscum contagiosum | 37,650 | 17-Aug-96 |
| | | | | | | virus subtype 1 | | |
| rxa01945 | 2115 | GB_GSS15: AQ632158 | 445 | AQ632158 | RPCI-11-473F7.TJ RPCI-11 Homo sapiens genomic clone | Homo sapiens | 38,095 | 17-Jun-99 |
| | | | | | RPCI-11-473F7, genomic survey sequence. | | | |
| | | GB_GSS15: AQ632158 | 445 | AQ632158 | RPCI-11-473F7.TJ RPCI-11 Homo sapiens genomic clone RPCI-11-473F7, | Homo sapiens | 40,275 | 17-Jun-99 |
| | | | | | genomic survey sequence. | | | |
| rxa01957 | 585 | GB_EST16: C35275 | 300 | C35275 | C35275 Yuji Kohara unpublished cDNA: Strain N2 hermaphrodite embryo | Caenorhabditis elegans | 37,698 | 18-OCT-1999 |
| | | | | | Caenorhabditis elegans cDNA clone yk427e6 3′, mRNA sequence. | | | |
| | | GB_IN2: CELC29H12 | 42635 | U23169 | Caenorhabditis elegans cosmid C29H12. | Caenorhabditis elegans | 34,477 | 13-Jul-95 |
| | | GB_GSS1: CNS00GP0 | 1101 | AL072364 | Drosophila melanogaster genome survey sequence T7 end of BAC: BACR33I08 | Drosophila melanogaster | 34,321 | 3-Jun-99 |
| | | | | | of RPCI-98 library from | | | |
| | | | | | Drosophila melanogaster (fruit fly), genomic survey sequence. | | | |
| rxa01958 | 630 | GB_PR1: HSIL1RECA | 12565 | X64532 | H. sapiens gene for interleukin-1 receptor antagonist. | Homo sapiens | 42,079 | 25-Jun-97 |
| | | GB_PR3: HSU65590 | 33414 | U65590 | Homo sapiens IL-1 receptor antagonist IL-1Ra (IL-1RN) gene, alternatively | Homo sapiens | 42,079 | 21-DEC-1997 |
| | | | | | spliced forms, complete cds. | | | |
| | | GB_GSS11: AQ293677 | 476 | AQ293677 | HS_2254_A2_C03_MF CIT Approved Human | Homo sapiens | 36,772 | 15-DEC-1998 |
| | | | | | Genomic Sperm Library D Homo sapiens genomic | | | |
| | | | | | clone Plate = 2254 Col = 6 Row = E, genomic survey sequence. | | | |
| rxa01959 | | | | | | | | |
| rxa01960 | | | | | | | | |
| rxa01961 | 603 | GB_BA2: U67460 | 12589 | U67460 | Methanococcus jannaschii section 2 of 150 of the complete genome. | Methanococcus jannaschii | 36,013 | 28-Jan-98 |
| | | GB_EST25: AI260761 | 626 | AI260761 | LP04729.3prime LP Drosophila melanogaster larval-early pupal pOT2 | Drosophila melanogaster | 39,130 | 17-Nov-98 |
| | | | | | Drosophila melanogaster cDNA clone LP04729 3prime, mRNA sequence. | | | |
| | | GB_EST25: AI294890 | 554 | AI294890 | LP08371.3prime LP Drosophila melanogaster larval-early pupal pOT2 | Drosophila melanogaster | 38,940 | 01-DEC-1998 |
| | | | | | Drosophila melanogastercDNA clone LP08371 3prime, mRNA sequence. | | | |
| rxa01962 | 693 | GB_BA2: U67460 | 12589 | U67460 | Methanococcus jannaschii section 2 of 150 of the complete genome. | Methanococcus jannaschii | 34,795 | 28-Jan-98 |
| | | GB_BA2: U67460 | 12589 | U67460 | Methanococcus jannaschii section 2 of 150 of the complete genome. | Methanococcus jannaschii | 37,666 | 28-Jan-98 |
| rxa01963 | 784 | GB_PR4: AC006397 | 91460 | AC006397 | Homo sapiens BAC clone GS170I02 from 7p21-p15.1, complete sequence. | Homo sapiens | 35,401 | 17-Feb-99 |
| | | GB_PR3: AC005565 | 39441 | AC005565 | Homo sapiens chromosome 16, cosmid clone 444B9 (LANL), complete sequence. | Homo sapiens | 37,891 | 30-Aug-98 |
| | | GB_PR2: D86999 | 40778 | D86999 | Homo sapiens immunoglobulin lambda gene locus DNA, clone: 22A12. | Homo sapiens | 38,212 | 5-Nov-99 |
| rxa01964 | 1426 | GB_GSS13: AQ465174 | 437 | AQ465174 | HS_5109_A2_C07_SP6E RPCI-11 Human Male BAC Library Homo | Homo sapiens | 40,084 | 23-Apr-99 |
| | | | | | sapiens genomic clone | | | |
| | | | | | Plate = 685 | | | |
| | | | | | Col = 14 Row = E, genomic survey sequence. | | | |
| | | GB_GSS13: AQ457528 | 599 | AQ457528 | HS_5087_A1_H06_SP6E RPCI-11 Human Male BAC Library Homo sapiens | Homo sapiens | 36,728 | 23-Apr-99 |
| | | | | | genomic clone | | | |
| | | | | | Plate = 663 | | | |
| | | | | | Col = 11 Row = O, genomic survey sequence. | | | |
| | | GB_GSS13: AQ454028 | 527 | AQ454028 | HS_5171_B1_D12_T7A RPCI-11 Human Male BAC Library | Homo sapiens | 37,137 | 21-Apr-99 |
| | | | | | Homo sapiens genomic clone | | | |
| | | | | | Plate = 747 Col = 23 Row = H, genomic survey sequence. | | | |
| rxa01965 | 684 | GB_IN2: AC004283 | 80095 | AC004283 | Drosophila melanogaster DNA sequence (P1 DS05557 (D152)), complete sequence. | Drosophila melanogaster | 36,982 | 29-Aug-98 |
| | | GB_EST28: AI541584 | 585 | AI541584 | SD02734.5prime SD Drosophila melanogaster Schneider L2 cell | Drosophila melanogaster | 38,375 | 22-MAR-1999 |
| | | | | | culture pOT2 Drosophila | | | |
| | | | | | melanogaster cDNA clone SD02734 5prime, mRNA sequence. | | | |
| | | GB_EST22: AI013385 | 434 | AI013385 | EST208060 Normalized rat spleen, Bento Soares Rattus sp. cDNA clone RSPBK32 | Rattus sp. | 42,126 | 31-Jan-99 |
| | | | | | 3′ end, mRNA sequence. | | | |
| rxa01966 | 780 | GB_GSS1: CNS00AMI | 810 | AL055260 | Drosophila melanogaster genome survey sequence TET3 end of BAC # BACR21F10 | Drosophila melanogaster | 37,592 | 4-Jun-99 |
| | | | | | of RPCI-98 | | | |
| | | | | | library from Drosophila melanogaster (fruit fly), genomic survey sequence. | | | |
| | | GB_HTG3: AC009567 | 164147 | AC009567 | Homo sapiens chromosome 4 clone 21_G_20 map 4, *** SEQUENCING | Homo sapiens | 35,844 | 29-Sep-99 |
| | | | | | IN PROGRESS ***, 14 unordered pieces. | | | |
| | | GB_HTG3: AC009567 | 164147 | AC009567 | Homo sapiens chromosome 4 clone 21_G_20 map 4, *** SEQUENCING | Homo sapiens | 35,844 | 29-Sep-99 |
| | | | | | IN PROGRESS ***, 14 unordered pieces. | | | |
| rxa01968 | 1281 | GB_PR4: AC005146 | 157653 | AC005146 | Homo sapiens 12q24.2 PAC RPCI1-157K6 (Roswell Park Cancer Institute | Homo sapiens | 40,620 | 11-Nov-98 |
| | | | | | Human PAC library) complete sequence. | | | |
| | | GB_PR4: AC006549 | 174844 | AC006549 | Homo sapiens, complete sequence. | Homo sapiens | 34,202 | 26-Nov-99 |
| | | GB_PR2: HSAC002070 | 165197 | AC002070 | Human BAC clone 7E17 from 12q, complete sequence. | Homo sapiens | 36,482 | 12-MAY-1997 |
| rxa01969 | 489 | GB_SY: SCU53587 | 4546 | U53587 | Artificial Corynebacterium glutamicum IS1207-derived transposon transposase genes, | synthetic construct | 98,160 | 06-MAY-1996 |
| | | | | | complete cds, | | | |
| | | | | | and 3′5″-aminoglycoside phosphotransferase (aphA-3) gene, complete cds. | | | |
| | | GB_PAT: I43826 | 1452 | I43826 | Sequence 1 from patent US 5633154. | Unknown. | 98,963 | 07-OCT-1997 |
| | | GB_BA1: CGIS1207 | 1453 | X96962 | C. glutamicum insertion sequence IS1207 and transposase gene. | Corynebacterium | 98,755 | 01-MAY-1997 |
| | | | | | | glutamicum | | |
| rxa01973 | | | | | | | | |
| rxa01974 | 1908 | GB_PL1: SC9320A | 24000 | Z68329 | S. cerevisiae chromosome IV cosmid 9320A. | Saccharomyces cerevisiae | 36,528 | 11-Aug-97 |
| | | GB_PL1: SC9320X | 22253 | Z70202 | S. cerevisiae chromosome IV cosmid 9320X. | Saccharomyces cerevisiae | 36,528 | 11-Aug-97 |
| | | GB_PR4: AC006210 | 186986 | AC006210 | Homo sapiens Xp22-150 BAC GSHB-309P15 (Genome Systems | Homo sapiens | 38,351 | 31-DEC-1998 |
| | | | | | Human BAC Library) complete sequence. | | | |
| rxa01976 | 1644 | GB_BA2: CGU13922 | 4412 | U13922 | Corynebacterium glutamicum putative type II 5-cytosoine methyltransferase (cgIIM) | Corynebacterium | 47,727 | 3-Feb-98 |
| | | | | | and putative type | | | |
| | | | | | II restriction endonuclease | | | |
| | | | | | (cgIIR) and putative type I or type III restriction endonuclease (clgIIR) | glutamicum | | |
| | | | | | genes, complete cds. | | | |
| | | GB_BA2: CGU13922 | 4412 | U13922 | Corynebacterium glutamicum putative type II 5-cytosoine methyltransferase (cgIIM) | Corynebacterium | 37,515 | 3-Feb-98 |
| | | | | | and putative type | | | |
| | | | | | II restriction | | | |
| | | | | | endonuclease (cgIIR) and putative type I or type III restriction endonuclease (clgIIR) | glutamicum | | |
| | | | | | genes, complete cds. | | | |
| rxa01977 | 699 | GB_PR3: HS426F10 | 91640 | AL023586 | Human DNA sequence from clone 426F10 on chromosome 1p36.21-36.33 | Homo sapiens | 38,295 | 23-Nov-99 |
| | | | | | Contains EST, CA repeat, STS, complete sequence. | | | |
| | | GB_GSS6: AQ823696 | 587 | AQ823696 | HS_3228_A1_D10_T7C CIT Approved Human Genomic Sperm Library | Homo sapiens | 37,637 | 26-Aug-99 |
| | | | | | D Homo sapiens genomic | | | |
| | | | | | clone Plate = 3228 Col = 19 | | | |
| | | | | | Row = G, genomic survey sequence. | | | |
| | | GB_VI: HS3DNA1 | 892 | M29629 | Varicella-zoster virus (VZV) DNA, 5′ end. | Human herpesvirus 3 | 33,857 | 2-Aug-93 |
| rxa01982 | 1281 | GB_EST8: AA009257 | 472 | AA009257 | mh02g07.r1 Soares mouse embryo NbME13.5 14.5 Mus musculus | Mus musculus | 36,017 | 26-Jul-96 |
| | | | | | cDNA clone IMAGE: 441372 5′, mRNA sequence. | | | |
| | | GB_EST8: AA009257 | 472 | AA009257 | mh02g07.r1 Soares mouse embryo NbME13.5 14.5 Mus musculus | Mus musculus | 38,710 | 26-Jul-96 |
| | | | | | cDNA clone IMAGE: 441372 5′, mRNA sequence. | | | |
| rxa01987 | 336 | GB_PR4: AC009330 | 174768 | AC009330 | Homo sapiens clone RP11-83M17 from 7q31, complete sequence. | Homo sapiens | 33,036 | 09-DEC-1999 |
| | | GB_HTG6: AC007300 | 171472 | AC007300 | Drosophila melanogaster chromosome 2 clone BACR09I15 (D570) RPCI-98 | Drosophila melanogaster | 38,782 | 07-DEC-1999 |
| | | | | | 09.I.15 map 32A-32A strain y; cn bw sp, *** SEQUENCING IN | | | |
| | | | | | PROGRESS ***, 43 unordered pieces. | | | |
| | | GB_HTG3: AC009542 | 160367 | AC009542 | Homo sapiens chromosome 7, *** SEQUENCING IN PROGRESS ***, | Homo sapiens | 35,065 | 27-Aug-99 |
| | | | | | 17 unordered pieces. | | | |
| rxa01988 | 549 | GB_IN1: AC002446 | 50978 | AC002446 | Drosophila melanogaster (P1 DS06754 (D83)) DNA sequence, complete sequence. | Drosophila melanogaster | 38,920 | 19-Aug-97 |
| | | GB_PR3: HSU19H10 | 43303 | AL021182 | Human DNA sequence from cosmid U19H10 on chromosome X. Contains ESTs and | Homo sapiens | 39,006 | 23-Nov-99 |
| | | | | | CA repeat. | | | |
| | | GB_PR3: HSU19H10 | 43303 | AL021182 | Human DNA sequence from cosmid U19H10 on chromosome X. Contains ESTs and | Homo sapiens | 38,447 | 23-Nov-99 |
| | | | | | CA repeat. | | | |
| rxa01990 | 1022 | GB_GSS9: AQ100628 | 382 | AQ100628 | HS_3054_B2_A05_MF CIT Approved Human Genomic Sperm Library | Homo sapiens | 38,320 | 27-Aug-98 |
| | | | | | D Homo sapiens genomic | | | |
| | | | | | clone Plate = 3054 Col = 10 Row = B, genomic survey sequence. | | | |
| | | GB_EST14: AA406679 | 338 | AA406679 | MBAFCZ2F12T3A Brugia malayi adult female cDNA (SAW96MLW-BmAF) | Brugia malayi | 38,039 | 01-MAY-1997 |
| | | | | | Brugia malayi cDNA clone AFCZ2F12 5′, mRNA sequence. | | | |
| | | GB_EST21: AA991134 | 600 | AA991134 | BSBmMFSZ06C1SK Brugia malayi microfilaria cDNA (SAW94LS-BmMf) | Brugia malayi | 40,090 | 5-Jun-98 |
| | | | | | Brugia malayi cDNA clone BSBmMFSZ06C1 5′, mRNA sequence. | | | |
| rxa01991 | 996 | GB_HTG3: AC007559 | 156374 | AC007559 | Homo sapiens clone NH0364J06, *** SEQUENCING IN PROGRESS ***, | Homo sapiens | 35,931 | 13-Aug-99 |
| | | | | | 29 unordered pieces. | | | |
| | | GB_HTG3: AC007559 | 156374 | AC007559 | Homo sapiens clone NH0364J06, *** SEQUENCING IN PROGRESS ***, | Homo sapiens | 35,931 | 13-Aug-99 |
| | | | | | 29 unordered pieces. | | | |
| | | GB_HTG3: AC007559 | 156374 | AC007559 | Homo sapiens clone NH0364J06, *** SEQUENCING IN PROGRESS ***, | Homo sapiens | 36,120 | 13-Aug-99 |
| | | | | | 29 unordered pieces. | | | |
| rxa01992 | | | | | | | | |
| rxa01996 | 660 | GB_BA1: XCXPSGEN | 5324 | X59079 | X. campestris xps E, F, G, H, I, and J genes for protein secretion and | Xanthomonas campestris | 38,447 | 12-Sep-93 |
| | | | | | pathogenicity functions. | | | |
| | | GB_GSS15: AQ659461 | 394 | AQ659461 | Sheared DNA-5C7.TR Sheared DNA Trypanosoma brucei genomic clone | Trypanosoma brucei | 49,180 | 23-Jun-99 |
| | | | | | Sheared DNA-5C7, genomic survey sequence. | | | |
| | | GB_GSS4: AQ741049 | 713 | AQ741049 | HS_2272_A2_B02_MR CIT Approved Human Genomic Sperm Library | Homo sapiens | 39,614 | 16-Jul-99 |
| | | | | | D Homo sapiens genomic | | | |
| | | | | | clone Plate = 2272 Col = 4 Row = C, genomic survey sequence. | | | |
| rxa01999 | 594 | GB_HTG2: AC007321 | 159558 | AC007321 | Homo sapiens clone NH0507C01, *** SEQUENCING IN PROGRESS ***, | Homo sapiens | 34,524 | 16-Apr-99 |
| | | | | | 4 unordered pieces. | | | |
| | | GB_HTG2: AC007321 | 159558 | AC007321 | Homo sapiens clone NH0507C01, *** SEQUENCING IN PROGRESS ***, | Homo sapiens | 34,524 | 16-Apr-99 |
| | | | | | 4 unordered pieces. | | | |
| | | GB_HTG2: AC007321 | 159558 | AC007321 | Homo sapiens clone NH0507C01, *** SEQUENCING IN PROGRESS ***, | Homo sapiens | 35,094 | 16-Apr-99 |
| | | | | | 4 unordered pieces. | | | |
| rxa02001 | 1281 | GB_BA1: D90917 | 154619 | D90917 | Synechocystis sp. PCC6803 complete genome, 27/27, 3418852-3573470. | Synechocystis sp. | 50,474 | 7-Feb-99 |
| | | GB_BA1: MTV016 | 53662 | AL021841 | Mycobacterium tuberculosis H37Rv complete genome; segment 143/162. | Mycobacterium | 39,223 | 23-Jun-99 |
| | | | | | | tuberculosis | | |
| | | GB_BA1: BSUB0006 | 210440 | Z99109 | Bacillus subtilis complete genome (section 6 of 21): from 999501 to 1209940. | Bacillus subtilis | 36,445 | 26-Nov-97 |
| rxa02004 | 230 | GB_HTG3: AC011491 | 162134 | AC011491 | Homo sapiens chromosome 19 clone CIT978SKB_180A7, *** SEQUENCING | Homo sapiens | 37,383 | 07-OCT-1999 |
| | | | | | IN PROGRESS ***, 161 unordered pieces. | | | |
| | | GB_HTG3: AC011491 | 162134 | AC011491 | Homo sapiens chromosome 19 clone CIT978SKB_180A7, *** SEQUENCING IN | Homo sapiens | 37,383 | 07-OCT-1999 |
| | | | | | PROGRESS ***, 161 unordered pieces. | | | |
| | | GB_HTG3: AC011357 | 160676 | AC011357 | Homo sapiens chromosome 5 clone CIT-HSPC_362D12, *** SEQUENCING IN | Homo sapiens | 54,585 | 06-OCT-1999 |
| | | | | | PROGRESS ***, 42 unordered pieces. | | | |
| rxa02006 | 595 | GB_HTG2: AC006901 | 294136 | AC006901 | Caenorhabditis elegans clone Y74A11X, *** SEQUENCING IN PROGRESS | Caenorhabditis elegans | 37,500 | 26-Feb-99 |
| | | | | | ***, 81 unordered pieces. | | | |
| | | GB_HTG2: AC006901 | 294136 | AC006901 | Caenorhabditis elegans clone Y74A11X, *** SEQUENCING IN PROGRESS ***, | Caenorhabditis elegans | 37,500 | 26-Feb-99 |
| | | | | | 81 unordered pieces. | | | |
| | | GB_HTG1: CEY70C5 | 224525 | Z98878 | Caenorhabditis elegans chromosome V clone Y70C5, *** SEQUENCING | Caenorhabditis elegans | 36,021 | 28-Aug-97 |
| | | | | | IN PROGRESS ***, in unordered pieces. | | | |
| rxa02007 | 756 | GB_BA2: CGL012293 | 2952 | AJ012293 | Corynebacterium glutamicum ilvD gene. | Corynebacterium | 100,000 | 01-OCT-1999 |
| | | | | | | glutamicum | | |
| | | GB_PR4: AC006285 | 150172 | AC006285 | Homo sapiens, complete sequence. | Homo sapiens | 38,740 | 15-Nov-99 |
| | | GB_PR4: AC006285 | 150172 | AC006285 | Homo sapiens, complete sequence. | Homo sapiens | 38,701 | 15-Nov-99 |
| rxa02009 | 223 | GB_PR4: AC004926 | 153556 | AC004926 | Homo sapiens PAC clone DJ0910H09 from 7q21.1-q21.2, complete sequence. | Homo sapiens | 38,462 | 17-Feb-99 |
| | | GB_PR2: AP000053 | 100000 | AP000053 | Homo sapiens genomic DNA, chromosome 21q22.1, segment 24/28, | Homo sapiens | 37,674 | 20-Nov-99 |
| | | | | | complete sequence. | | | |
| | | GB_PR2: AP000121 | 100000 | AP000121 | Homo sapiens genomic DNA of 21q22.1, GART and AML related, SLC5A3-f4A4 | Homo sapiens | 37,674 | 25-Sep-99 |
| | | | | | region, segment 4/8, complete sequence. | | | |
| rxa02013 | 649 | GB_BA1: MTCI237 | 27030 | Z94752 | Mycobacterium tuberculosis H37Rv complete genome; segment 46/162. | Mycobacterium | 39,308 | 17-Jun-98 |
| | | | | | | tuberculosis | | |
| | | GB_HTG4: AC010885 | 201581 | AC010885 | Homo sapiens chromosome unknown clone NH0368K23, WORKING DRAFT | Homo sapiens | 37,206 | 29-OCT-1999 |
| | | | | | SEQUENCE, in unordered pieces. | | | |
| | | GB_HTG4: AC010885 | 201581 | AC010885 | Homo sapiens chromosome unknown clone NH0368K23, WORKING DRAFT | Homo sapiens | 37,206 | 29-OCT-1999 |
| | | | | | SEQUENCE, in unordered pieces. | | | |
| rxa02014 | 630 | GB_HTG3: AC010769 | 119431 | AC010769 | Homo sapiens chromosome 15 clone 28_B_17 map 15, | Homo sapiens | 33,816 | 22-Sep-99 |
| | | | | | LOW-PASS SEQUENCE SAMPLING. | | | |
| | | GB_HTG3: AC010769 | 119431 | AC010769 | Homo sapiens chromosome 15 clone 28_B_17 map 15, LOW-PASS | Homo sapiens | 33,816 | 22-Sep-99 |
| | | | | | SEQUENCE SAMPLING. | | | |
| | | GB_EST34: AI783738 | 320 | AI783738 | tu45b07.x1 NCI_CGAP_Pr28 Homo sapiens cDNA clone IMAGE: 2253973 | Homo sapiens | 37,855 | 1-Jul-99 |
| | | | | | 3′, mRNA sequence. | | | |
| rxa02019 | 524 | GB_EST15: AA473289 | 318 | AA473289 | vd44g09.r1 Barstead MPLRB1 Mus musculus cDNA clone IMAGE: 803488 5′, | Mus musculus | 38,153 | 18-Jun-97 |
| | | | | | mRNA sequence. | | | |
| | | GB_HTG1: CEY102A5_3 | 110000 | Z99711 | Caenorhabditis elegans chromosome V clone Y102A5, *** SEQUENCING IN | Caenorhabditis elegans | 38,867 | 9-Jun-98 |
| | | | | | PROGRESS ***, in unordered pieces. | | | |
| | | GB_HTG1: CEY102A5_3 | 110000 | Z99711 | Caenorhabditis elegans chromosome V clone Y102A5, *** SEQUENCING IN | Caenorhabditis elegans | 38,867 | 9-Jun-98 |
| | | | | | PROGRESS ***, in unordered pieces. | | | |
| rxa02021 | 1071 | GB_BA1: CGDNAAROP | 2612 | X85965 | C. glutamicum ORF3 and aroP gene. | Corynebacterium | 99,905 | 30-Nov-97 |
| | | | | | | glutamicum | | |
| | | GB_BA1: CGDAPE | 1966 | X81379 | C. glutamicum dapE gene and orf2. | Corynebacterium | 36,406 | 8-Aug-95 |
| | | | | | | glutamicum | | |
| | | GB_BA1: SCI7 | 34893 | AL096743 | Streptomyces coelicolor cosmid I7. | Streptomyces coelicolor | 36,782 | 1-Jul-99 |
| rxa02023 | 891 | GB_BA1: CGDAPE | 1966 | X81379 | C. glutamicum dapE gene and orf2. | Corynebacterium | 99,864 | 8-Aug-95 |
| | | | | | | glutamicum | | |
| | | GB_PR3: AC004067 | 161326 | AC004067 | Homo sapiens chromosome 4 clone B366O24 map 4q25, complete sequence. | Homo sapiens | 39,651 | 8-Nov-98 |
| | | GB_HTG3: AC009725 | 145005 | AC009725 | Mus musculus chromosome 6 clone 388_N_17 map 6, *** SEQUENCING IN | Mus musculus | 38,215 | 01-OCT-1999 |
| | | | | | PROGRESS ***, 2 ordered pieces. | | | |
| rxa02032 | 693 | GB_PR4: AC006961 | 171419 | AC006961 | Homo sapiens chromosome 18, clone RP11-31P16, complete sequence. | Homo sapiens | 37,703 | 19-Nov-99 |
| | | GB_PR4: AC006961 | 171419 | AC006961 | Homo sapiens chromosome 18, clone RP11-31P16, complete sequence. | Homo sapiens | 40,839 | 19-Nov-99 |
| rxa02036 | 504 | GB_PR2: HSDJ799G3 | 127639 | AL078624 | Human DNA sequence from clone RP4-799G3 on chromosome 1q42.11-42.3, | Homo sapiens | 35,657 | 22-Nov-99 |
| | | | | | complete sequence. | | | |
| | | GB_BA1: AOPCZA361 | 37941 | AJ223998 | Amycolatopsis orientalis cosmid PCZA361. | Amycolatopsis orientalis | 46,341 | 29-MAR-1999 |
| | | GB_PL1: ATDNADAL1 | 8747 | Y14851 | Arabidopsis thaliana dal1 gene. | Arabidopsis thaliana | 35,223 | 23-Sep-97 |
| rxa02039 | 863 | GB_PR3: AC005609 | 157970 | AC005609 | Homo sapiens chromosome 5, BAC clone 203o13 (LBNL H155), complete sequence. | Homo sapiens | 37,176 | 4-Sep-98 |
| | | GB_HTG3: AC008468 | 245016 | AC008468 | Homo sapiens chromosome 5 clone CIT-HSPC_365B8, *** SEQUENCING IN | Homo sapiens | 36,842 | 3-Aug-99 |
| | | | | | PROGRESS ***, 14 unordered pieces. | | | |
| | | GB_HTG3: AC008468 | 245016 | AC008468 | Homo sapiens chromosome 5 clone CIT-HSPC_365B8, *** SEQUENCING IN | Homo sapiens | 36,842 | 3-Aug-99 |
| | | | | | PROGRESS ***, 14 unordered pieces. | | | |
| rxa02040 | 551 | GB_HTG3: AC009303 | 198549 | AC009303 | Homo sapiens clone NH0098C01, *** SEQUENCING IN PROGRESS ***, | Homo sapiens | 35,424 | 13-Aug-99 |
| | | | | | 2 unordered pieces. | | | |
| | | GB_HTG3: AC009303 | 198549 | AC009303 | Homo sapiens clone NH0098C01, *** SEQUENCING IN PROGRESS ***, | Homo sapiens | 35,424 | 13-Aug-99 |
| | | | | | 2 unordered pieces. | | | |
| | | GB_HTG3: AC009303 | 198549 | AC009303 | Homo sapiens clone NH0098C01, *** SEQUENCING IN PROGRESS ***, | Homo sapiens | 32,597 | 13-Aug-99 |
| | | | | | 2 unordered pieces. | | | |
| rxa02045 | 384 | GB_EST3: R23812 | 459 | R23812 | yh34g05.r1 Soares placenta Nb2HP Homo sapiens cDNA clone IMAGE: | Homo sapiens | 47,273 | 20-Apr-95 |
| | | | | | 131672 5′, mRNA sequence. | | | |
| | | GB_EST19: AA778733 | 611 | AA778733 | af88d02.s1 Soares_testis_NHT Homo sapiens cDNA clone 1049091 | Homo sapiens | 38,806 | 5-Feb-98 |
| | | | | | 3′, mRNA sequence. | | | |
| | | GB_PR2: HSU59185 | 2529 | U59185 | Human putative monocarboxylate transporter (MCT) mRNA, complete cds. | Homo sapiens | 43,164 | 03-OCT-1997 |
| rxa02046 | 540 | GB_HTG3: AC005507 | 196595 | AC005507 | Plasmodium falciparum chromosome 12 clone 3D7, *** SEQUENCING IN | Plasmodium falciparum | 37,218 | 23-Sep-99 |
| | | | | | PROGRESS ***, 3 unordered pieces. | | | |
| | | GB_HTG3: AC005507 | 196595 | AC005507 | Plasmodium falciparum chromosome 12 clone 3D7, *** SEQUENCING IN | Plasmodium falciparum | 37,218 | 23-Sep-99 |
| | | | | | PROGRESS ***, 3 unordered pieces. | | | |
| | | GB_EST1: T09984 | 330 | T09984 | 0540m7 gmbPfHB3.1, G. Roman Reddy Plasmodium falciparum genomic clone | Plasmodium falciparum | 32,121 | 29-Nov-93 |
| | | | | | 0540m, mRNA sequence. | | | |
| rxa02049 | 732 | GB_PL1: ATHCOLR | 1098 | M37778 | A. thaliana middle repetative sequence. | Arabidopsis thaliana | 33,755 | 27-Apr-93 |
| | | GB_PL2: ATAC006954 | 87035 | AC006954 | Arabidopsis thaliana chromosome II BAC F25P17 genomic sequence, | Arabidopsis thaliana | 33,755 | 7-Apr-99 |
| | | | | | complete sequence. | | | |
| | | GB_EST33: AI779067 | 495 | AI779067 | EST259946 tomato susceptible, Cornell Lycopersicon esculentum cDNA clone | Lycopersicon esculentum | 35,223 | 29-Jun-99 |
| | | | | | cLES7C7, mRNA sequence. | | | |
| rxa02050 | 918 | GB_HTG2: AC008307 | 91654 | AC008307 | Drosophila melanogaster chromosome 3 clone BACR03D22 (D709) RPCI-98 03.D.22 | Drosophila melanogaster | 36,182 | 2-Aug-99 |
| | | | | | map 86F-87A strain y; cn bw sp, *** SEQUENCING IN PROGRESS ***, | | | |
| | | | | | 94 unordered pieces. | | | |
| | | GB_HTG2: AC008307 | 91654 | AC008307 | Drosophila melanogaster chromosome 3 clone BACR03D22 (D709) RPCI-98 03.D.22 | Drosophila melanogaster | 36,182 | 2-Aug-99 |
| | | | | | map 86F-87A strain y; cn bw sp, *** SEQUENCING IN PROGRESS ***, | | | |
| | | | | | 94 unordered pieces. | | | |
| | | GB_EST31: AU060923 | 663 | AU060923 | AU060923 Dictyostelium discoideum SL (H. Urushihara) Dictyostelium discoideum | Dictyostelium discoideum | 39,388 | 20-MAY-1999 |
| | | | | | cDNA clone SLC248, mRNA sequence. | | | |
| rxa02051 | 621 | GB_EST16: C43896 | 369 | C43896 | C43896 Yuji Kohara unpublished cDNA: Strain N2 hermaphrodite embryo | Caenorhabditis elegans | 41,160 | 18-OCT-1999 |
| | | | | | Caenorhabditis elegans cDNA clone yk336c10 5′, mRNA sequence. | | | |
| | | GB_EST16: C40413 | 360 | C40413 | C40413 Yuji Kohara unpublished cDNA: Strain N2 hermaphrodite embryo | Caenorhabditis elegans | 42,090 | 18-OCT-1999 |
| | | | | | Caenorhabditis elegans cDNA clone yk230e7 5′, mRNA sequence. | | | |
| | | GB_EST36: AV191515 | 360 | AV191515 | AV191515 Yuji Kohara unpublished cDNA: Strain N2 hermaphrodite embryo | Caenorhabditis elegans | 40,833 | 22-Jul-99 |
| | | | | | Caenorhabditis elegans cDNA clone yk594g6 5′, mRNA sequence. | | | |
| rxa02053 | 702 | GB_IN1: AF035264 | 6397 | AF035264 | Drosophila melanogaster POU domain protein (pdm-1) gene, promoter region and | Drosophila melanogaster | 36,888 | 04-DEC-1997 |
| | | | | | exon 1. | | | |
| | | GB_BA1: MTV036 | 24055 | AL021931 | Mycobacterium tuberculosis H37Rv complete genome; segment 19/162. | Mycobacterium | 37,647 | 17-Jun-98 |
| | | | | | | tuberculosis | | |
| | | GB_EST30: AI658116 | 497 | AI658116 | fc22e07.y1 Zebrafish WashU MPIMG EST Danio rerio cDNA 5′ similar to TR: | Danio rerio | 41,129 | 06-MAY-1999 |
| | | | | | Q15883 Q15883 X104.;, mRNA sequence. | | | |
| rxa02057 | 654 | GB_PAT: E14601 | 4394 | E14601 | Brevibacterium lactofermentum gene for alpha-ketoglutaric acid dehydrogenase. | Corynebacterium | 96,667 | 28-Jul-99 |
| | | | | | | glutamicum | | |
| | | GB_BA1: D84102 | 4394 | D84102 | Corynebacterium glutamicum DNA for 2-oxoglutarate dehydrogenase, complete cds. | Corynebacterium | 96,667 | 6-Feb-99 |
| | | | | | | glutamicum | | |
| | | GB_PAT: E14601 | 4394 | E14601 | Brevibacterium lactofermentum gene for alpha-ketoglutaric acid dehydrogenase. | Corynebacterium | 38,199 | 28-Jul-99 |
| | | | | | | glutamicum | | |
| rxa02058 | 675 | GB_GSS9: AQ129748 | 432 | AQ129748 | HS_2254_B1_H03_MF CIT Approved Human Genomic Sperm Library D | Homo sapiens | 40,000 | 23-Sep-98 |
| | | | | | Homo sapiens genomic clone Plate = 2254 Col = 5 Row = P, genomic survey | | | |
| | | | | | sequence. | | | |
| | | GB_PL2: T15B16 | 90596 | AF104919 | Arabidopsis thaliana BAC T15B16. | Arabidopsis thaliana | 35,338 | 11-Nov-98 |
| | | GB_PL2: AC007138 | 120185 | AC007138 | Arabidopsis thaliana BAC T7B11 from chromosome IV near 10 cM, | Arabidopsis thaliana | 39,426 | 1-Apr-99 |
| | | | | | complete sequence. | | | |
| rxa02059 | 618 | GB_HTG3: AC008672 | 131573 | AC008672 | Homo sapiens chromosome 5 clone CIT978SKB_3B12, *** SEQUENCING IN | Homo sapiens | 40,871 | 3-Aug-99 |
| | | | | | PROGRESS ***, 71 unordered pieces. | | | |
| | | GB_HTG3: AC008672 | 131573 | AC008672 | Homo sapiens chromosome 5 clone CIT978SKB_3B12, *** SEQUENCING IN | Homo sapiens | 40,871 | 3-Aug-99 |
| | | | | | PROGRESS ***, 71 unordered pieces. | | | |
| | | GB_IN1: DDU06228 | 2695 | U06228 | Dictyostelium discoideum CRAC (dagA) gene, complete cds. | Dictyostelium discoideum | 36,513 | 1-Feb-95 |
| rxa02066 | 615 | GB_PR2: CNS01DRA | 198444 | AL110505 | Human chromosome 14 DNA sequence *** IN PROGRESS *** BAC R-816J8 of | Homo sapiens | 36,903 | 11-Nov-99 |
| | | | | | RPCI-11 library from chromosome 14 of Homo sapiens (Human), complete sequence. | | | |
| | | GB_PR2: HS230G1 | 125515 | Z84466 | Homo sapiens DNA sequence from PAC 230G1 on chromosome Xp11.3. Contains | Homo sapiens | 41,751 | 23-Nov-99 |
| | | | | | EST, STS and GSS, complete sequence. | | | |
| | | GB_PR2: CNS01DRA | 198444 | AL110505 | Human chromosome 14 DNA sequence *** IN PROGRESS *** BAC R-816J8 of | Homo sapiens | 36,589 | 11-Nov-99 |
| | | | | | RPCI-11 library from chromosome 14 of Homo sapiens (Human), complete sequence. | | | |
| rxa02067 | 579 | GB_HTG3: AC009543 | 159209 | AC009543 | Homo sapiens chromosome 11 clone 63_H_13 map 11, *** SEQUENCING IN | Homo sapiens | 35,366 | 07-OCT-1999 |
| | | | | | PROGRESS ***, 12 unordered pieces. | | | |
| | | GB_HTG3: AC009543 | 159209 | AC009543 | Homo sapiens chromosome 11 clone 63_H_13 map 11, *** SEQUENCING IN | Homo sapiens | 35,366 | 07-OCT-1999 |
| | | | | | PROGRESS ***, 12 unordered pieces. | | | |
| | | GB_PR2: HS230G1 | 125515 | Z84466 | Homo sapiens DNA sequence from PAC 230G1 on chromosome Xp11.3. Contains | Homo sapiens | 36,348 | 23-Nov-99 |
| | | | | | EST, STS and GSS, complete sequence. | | | |
| rxa02069 | 702 | GB_BA1: MTCI61 | 13540 | Z98260 | Mycobacterium tuberculosis H37Rv complete genome; segment 53/162. | Mycobacterium | 36,642 | 17-Jun-98 |
| | | | | | | tuberculosis | | |
| | | GB_BA1: MTCI61 | 13540 | Z98260 | Mycobacterium tuberculosis H37Rv complete genome; segment 53/162. | Mycobacterium | 39,474 | 17-Jun-98 |
| | | | | | | tuberculosis | | |
| rxa02070 | 1245 | GB_BA2: AE001112 | 14704 | AE001112 | Archaeoglobus fulgidus section 167 of 172 of the complete genome. | Archaeoglobus fulgidus | 39,352 | 15-DEC-1997 |
| | | GB_PR3: HSDJ47M23 | 129320 | AL096816 | Human DNA sequence *** SEQUENCING IN PROGRESS *** from clone dJ47M23, | Homo sapiens | 40,413 | 23-Nov-99 |
| | | | | | complete sequence. | | | |
| | | GB_HTG3: AC009139 | 152666 | AC009139 | Homo sapiens chromosome 16 clone RPCI-11_538I12, *** SEQUENCING IN | Homo sapiens | 35,275 | 3-Aug-99 |
| | | | | | PROGRESS ***, 27 unordered pieces. | | | |
| rxa02076 | 657 | GB_EST34: AI789138 | 594 | AI789138 | uk51e02.y1 Sugano mouse kidney mkia Mus musculus cDNA clone IMAGE: | Mus musculus | 43,041 | 2-Jul-99 |
| | | | | | 1972538 5′ similar to WP: R10H10.7 CE06298 TYROSINE-PROTEIN | | | |
| | | | | | KINASE LIKE;, mRNA sequence. | | | |
| | | GB_GSS1: FR0013995 | 552 | AL005239 | F. rubripes GSS sequence, clone 137O18aC6, genomic survey sequence. | Fugu rubripes | 37,079 | 18-Sep-97 |
| | | GB_GSS3: B27548 | 642 | B27548 | F19J9TFB IGF Arabidopsis thaliana genomic clone F19J9, genomic survey sequence. | Arabidopsis thaliana | 37,056 | 13-OCT-1997 |
| rxa02080 | 930 | GB_GSS15: AQ652136 | 411 | AQ652136 | Sheared DNA-7M23.TR Sheared DNA Trypanosoma brucei genomic clone | Trypanosoma brucei | 39,259 | 22-Jun-99 |
| | | | | | Sheared DNA-7M23, genomic survey sequence. | | | |
| | | GB_GSS15: AQ652498 | 450 | AQ652498 | Sheared DNA-22K16.TR Sheared DNA Trypanosoma brucei genomic clone | Trypanosoma brucei | 39,597 | 22-Jun-99 |
| | | | | | Sheared DNA-22K16, genomic survey sequence. | | | |
| | | GB_HTG3: AC009683 | 171597 | AC009683 | Homo sapiens chromosome 8 clone 76_N_5 map 8, *** SEQUENCING IN | Homo sapiens | 37,053 | 29-Sep-99 |
| | | | | | PROGRESS ***, 10 unordered pieces. | | | |
| rxa02081 | 1752 | GB_OV: BSU43200 | 2070 | U43200 | Boreogadus saida antifreeze glycopeptide AFGP polyprotein precursor gene, | Boreogadus saida | 37,016 | 12-MAY-1997 |
| | | | | | complete cds. | | | |
| | | GB_BA2: AE001615 | 12401 | AE001615 | Chlamydia pneumoniae section 31 of 103 of the complete genome. | Chlamydophila pneumoniae | 36,385 | 08-MAR-1999 |
| | | GB_OV: BSU43200 | 2070 | U43200 | Boreogadus saida antifreeze glycopeptide AFGP polyprotein precursor gene, | Boreogadus saida | 37,672 | 12-MAY-1997 |
| | | | | | complete cds. | | | |
| rxa02084 | 468 | GB_PR4: AC007382 | 80547 | AC007382 | Homo sapiens clone NH0288C18, complete sequence. | Homo sapiens | 41,138 | 8-Sep-99 |
| | | GB_GSS4: AQ731530 | 508 | AQ731530 | HS_5543_A2_A05_T7A RPCI-11 Human Male BAC Library Homo sapiens | Homo sapiens | 36,245 | 15-Jul-99 |
| | | | | | genomic clone Plate = 1119 Col = 10 Row = A, genomic survey sequence. | | | |
| | | GB_PR4: AC007382 | 80547 | AC007382 | Homo sapiens clone NH0288C18, complete sequence. | Homo sapiens | 35,398 | 8-Sep-99 |
| rxa02089 | 594 | GB_PR2: AP000031 | 149298 | AP000031 | Homo sapiens genomic DNA, chromosome 21q22.1, segment 2/28, | Homo sapiens | 38,699 | 20-Nov-99 |
| | | | | | complete sequence. | | | |
| | | GB_PR2: AP000135 | 111894 | AP000135 | Homo sapiens genomic DNA of 21q22.1, GART and AML, f43D11-119B8 region, | Homo sapiens | 38,699 | 25-Sep-99 |
| | | | | | segment 10/10, complete sequence. | | | |
| | | GB_PR2: AP000213 | 100000 | AP000213 | Homo sapiens genomic DNA, chromosome 21q22.1, D21S226-AML region, clone | Homo sapiens | 38,699 | 20-Nov-99 |
| | | | | | f43D11-119B8, segment 11/12, complete sequence. | | | |
| rxa02090 | 924 | GB_PL2: ATAC006841 | 123183 | AC006841 | Arabidopsis thaliana chromosome II BAC F3K23 genomic sequence, | Arabidopsis thaliana | 39,826 | 6-Apr-99 |
| | | | | | complete sequence. | | | |
| | | GB_PL1: SCXV55KB | 54719 | Z70678 | S. cerevisiae chromosome XV DNA, 54.7 kb region. | Saccharomyces cerevisiae | 37,817 | 16-MAY-1997 |
| | | GB_PR1: D87675 | 301692 | D87675 | Homo sapiens DNA for amyloid precursor protein, complete cds. | Homo sapiens | 39,140 | 22-Sep-97 |
| rxa02091 | 774 | GB_BA2: AF031929 | 2675 | AF031929 | Lactobacillus helveticus cochaperonin GroES and chaperonin GroEL genes, complete | Lactobacillus helveticus | 35,509 | 8-Aug-98 |
| | | | | | cds; and DNA mismatch repair enzyme (hexA) gene, partial cds. | | | |
| | | GB_BA1: CGU43536 | 3464 | U43536 | Corynebacterium glutamicum heat shock, ATP-binding protein (clpB) gene, complete | Corynebacterium | 39,124 | 13-MAR-1997 |
| | | | | | cds. | glutamicum | | |
| | | GB_BA1: RCFBC | 3874 | X03476 | Rhodopseudomonas sphaeroides fbc operon (fbcF, fbcB, fbcC genes). | Rhodobacter sphaeroides | 36,478 | 10-Feb-99 |
| rxa02094 | 840 | GB_RO: MMHC188A7 | 120990 | AF109719 | Mus musculus casein kinase 2 beta subunit (gMCK2) gene, partial cds; BAT4, | Mus musculus | 38,118 | 25-OCT-1999 |
| | | | | | NG20 (NG20), BAT3, BAT2, AIF-1, B144, lymphotoxin beta, TNF, and TNF | | | |
| | | | | | beta genes, complete cds; IKBL gene, partial cds; and unknown gene. | | | |
| | | GB_EST10: AA168948 | 549 | AA168948 | ms39c08.r1 Life Tech mouse embryo 13 5dpc 10666014 Mus musculus cDNA clone | Mus musculus | 40,789 | 19-DEC-1996 |
| | | | | | IMAGE: 613934 5′ similar to gb: U15980 Mus musculus (MOUSE);, mRNA sequence. | | | |
| | | GB_EST24: AI101223 | 348 | AI101223 | EST210512 Normalized rat brain, Bento Soares Rattus sp. cDNA clone | Rattus sp. | 40,634 | 31-Jan-99 |
| | | | | | RBRBK04 3′ end, mRNA sequence. | | | |
| rxa02097 | 3495 | GB_BA2: RMU31512 | 1974 | U31512 | Rhizobium meliloti RmDEGP (degP) gene, complete cds. | Sinorhizobium meliloti | 39,159 | 05-MAR-1996 |
| | | GB_EST15: AA502050 | 346 | AA502050 | ng57c04.s1 NCI_CGAP_Lip2 Homo sapiens cDNA clone IMAGE: 938886 similar to | Homo sapiens | 40,751 | 18-Aug-97 |
| | | | | | contains Alu repetitive element;, mRNA sequence. | | | |
| | | GB_EST16: AA589883 | 400 | AA589883 | vl80h08.r1 Stratagene mouse diaphragm (#937303) Mus musculus cDNA clone | Mus musculus | 35,427 | 16-Sep-97 |
| | | | | | IMAGE: 987039 5′ similar to gb: M75716 Mus musculus alpha-1 protease | | | |
| | | | | | inhibitor 2 (MOUSE);, mRNA sequence. | | | |
| rxa02102 | 1281 | GB_IN2: AF135118 | 10830 | AF135118 | Drosophila melanogaster laminin alpha1, 2 (wing blister) mRNA, complete cds. | Drosophila melanogaster | 36,926 | 23-MAY-1999 |
| | | GB_IN1: AC002516 | 48158 | AC002516 | Drosophila melanogaster (P1 DS01068 (D37)) DNA sequence, complete sequence. | Drosophila melanogaster | 37,838 | 28-Aug-97 |
| | | GB_GSS3: B09866 | 1194 | B09866 | T16G20-Sp6 TAMU Arabidopsis thaliana genomic clone T16G20, genomic survey | Arabidopsis thaliana | 35,332 | 14-MAY-1997 |
| | | | | | sequence. | | | |
| rxa02103 | 519 | GB_GSS3: B09866 | 1194 | B09866 | T16G20-Sp6 TAMU Arabidopsis thaliana genomic clone T16G20, genomic survey | Arabidopsis thaliana | 36,310 | 14-MAY-1997 |
| | | | | | sequence. | | | |
| | | GB_EST34: AV165661 | 290 | AV165661 | AV165661 Mus musculus head C57BL/6J 13-day embryo Mus musculus cDNA | Mus musculus | 37,716 | 6-Jul-99 |
| | | | | | clone 3110038F04, mRNA sequence. | | | |
| | | GB_RO: AC002121 | 84056 | AC002121 | Genomic sequence from Mouse 11, complete sequence. | Mus musculus | 39,096 | 10-Jul-97 |
| rxa02104 | 1245 | GB_BA2: ECOUW67_0 | 110000 | U18997 | Lactobacillus helveticus K-12 chromosomal region from 67.4 to 76.0 minutes. | Escherichia coli | 39,024 | 22-Dec-94 |
| | | GB_BA2: AE000394 | 12221 | AE000394 | Lactobacillus helveticus K-12 MG1655 section 284 of 400 of the complete genome. | Escherichia coli | 39,024 | 12-Nov-98 |
| | | GB_BA1: ECORNPBW | 4434 | D90212 | E. coli rnpB gene and ORFs. | Escherichia coli | 45,255 | 7-Feb-99 |
| rxa02107 | | | | | | | | |
| rxa02108 | 732 | GB_BA1: D90912 | 128598 | D90912 | Synechocystis sp. PCC6803 complete genome, 14/27, 1719644-1848241. | Synechocystis sp. | 38,095 | 7-Feb-99 |
| | | GB_GSS13: AQ498890 | 431 | AQ498890 | HS_5154_A1_E06_SP6E RPCI-11 Human Male BAC Library Homo | Homo sapiens | 37,150 | 28-Apr-99 |
| | | | | | sapiens genomic clone Plate = 730 Col = 11 Row = I, genomic survey sequence. | | | |
| | | GB_BA1: D90912 | 128598 | D90912 | Synechocystis sp. PCC6803 complete genome, 14/27, 1719644-1848241. | Synechocystis sp. | 38,781 | 7-Feb-99 |
| rxa02109 | 1044 | GB_IN2: AC001658 | 91019 | AC001658 | Drosophila melanogaster DNA sequence (P1 DS00913 (D24)), complete sequence. | Drosophila melanogaster | 35,687 | 17-Jul-98 |
| | | GB_EST19: AA802304 | 581 | AA802304 | GM04170.5prime GM Drosophila melanogaster ovary BlueScript Drosophila | Drosophila melanogaster | 40,451 | 25-Nov-98 |
| | | | | | melanogaster cDNA clone GM04170 5prime, mRNA sequence. | | | |
| | | GB_EST35: AI822653 | 733 | AI822653 | L0-1173T3 Ice plant Lambda Uni-Zap XR expression library, 0 hours NaCl treatment | Mesembryanthemum | 36,957 | 12-Jul-99 |
| | | | | | Mesembryanthemum crystallinum cDNA clone L0-1173 5′ similar to Profilin 1 | crystallinum | | |
| | | | | | (AF092547) [Ricinus communis, mRNA sequence. | | | |
| rxa02114 | 509 | GB_BA1: SMU94899 | 2379 | U94899 | SinoRhizobium meliloti dissimilatory nitrous oxide reduction proteins NosY, NosL and | Sinorhizobium meliloti | 42,744 | 6-Sep-97 |
| | | | | | NosX genes, complete cds. | | | |
| | | GB_BA1: SMU94899 | 2379 | U94899 | SinoRhizobium meliloti dissimilatory nitrous oxide reduction proteins NosY, NosL and | Sinorhizobium meliloti | 39,486 | 6-Sep-97 |
| | | | | | NosX genes, complete cds. | | | |
| rxa02117 | 597 | GB_BA2: AF094575 | 18754 | AF094575 | Streptococcus pneumoniae serotype 19A DexB (dexB) gene, partial sequence; capsular | Streptococcus pneumoniae | 40,480 | 9-Sep-99 |
| | | | | | polysaccharide biosynthesis operon, complete sequence; and oligopeptide permease | | | |
| | | | | | AliA (aliA) gene, partial cds. | | | |
| | | GB_BA2: AF105113 | 5832 | AF105113 | Streptococcus pneumoniae type 19A putative oligosaccharide repeat unit transporter | Streptococcus pneumoniae | 40,652 | 9-Sep-99 |
| | | | | | (cps19AJ) gene, partial cds; UDP-N-acetyl glucosamine-2-epimerase (cps19AK), | | | |
| | | | | | glucose-1-phosphate thymidylyl transferase (cps19AL), dTDP-4-keto-6-deoxyglucose- | | | |
| | | | | | 3,5-epimerase (cps19AM), dTDP-glucose-4,6 dehydratase (cps19AN), and | | | |
| | | | | | dTDP-L-rhamnose synthase (cps19AO) genes, complete cds; and AliA (aliA) gene, | | | |
| | | | | | partial cds. | | | |
| | | GB_EST9: AA073381 | 429 | AA073381 | mm93a12.r1 Stratagene mouse heart (#937316) Mus musculus cDNA clone | Mus musculus | 46,341 | 15-Feb-97 |
| | | | | | IMAGE: 535966 5′ similar to gb: X03765 Mouse mRNA for cytoplasmatic beta-actin | | | |
| | | | | | (MOUSE);, mRNA sequence. | | | |
| rxa02121 | 828 | GB_PR4: AC004874 | 95983 | AC004874 | Homo sapiens PAC clone DJ0744D13 from 7q11, complete sequence. | Homo sapiens | 40,791 | 21-Nov-98 |
| | | GB_EST14: AA418305 | 440 | AA418305 | zv96g05.s1 Soares_NhHMPu_S1 Homo sapiens cDNA clone IMAGE: | Homo sapiens | 40,093 | 16-OCT-1997 |
| | | | | | 767672 3′, mRNA sequence. | | | |
| | | GB_BA2: U32763 | 12021 | U32763 | Haemophilus influenzae Rd section 78 of 163 of the complete genome. | Haemophilus influenzae Rd | 37,715 | 29-MAY-1998 |
| rxa02123 | 1494 | GB_BA1: MTCY10D7 | 39800 | Z79700 | Mycobacterium tuberculosis H37Rv complete genome; segment 44/162. | Mycobacterium | 62,083 | 17-Jun-98 |
| | | | | | | tuberculosis | | |
| | | GB_BA1: MTCY10D7 | 39800 | Z79700 | Mycobacterium tuberculosis H37Rv complete genome; segment 44/162. | Mycobacterium | 38,462 | 17-Jun-98 |
| | | | | | | tuberculosis | | |
| | | GB_GSS15: AQ639831 | 649 | AQ639831 | 927P1-20A2.TV 927P1 Trypanosoma brucei genomic clone 927P1-20A2, genomic | Trypanosoma brucei | 36,124 | 8-Jul-99 |
| | | | | | survey sequence. | | | |
| rxa02124 | 2079 | GB_PR2: HS242N11 | 167514 | AL023655 | Human DNA sequence from clone 242N11 on chromosome 6p22.3-23. Contains | Homo sapiens | 33,866 | 23-Nov-99 |
| | | | | | ESTs, STSs, GSSs, genomic marker D6S285, and ca and gaaa repeat polymorphisms, | | | |
| | | | | | complete sequence. | | | |
| | | GB_PR2: HS242N11 | 167514 | AL023655 | Human DNA sequence from clone 242N11 on chromosome 6p22.3-23. Contains | Homo sapiens | 36,342 | 23-Nov-99 |
| | | | | | ESTs, STSs, GSSs, genomic marker D6S285, and ca and gaaa repeat polymorphisms, | | | |
| | | | | | complete sequence. | | | |
| rxa02125 | 924 | GB_HTG1: CEY116A8_4 | 110000 | Z98858 | Caenorhabditis elegans chromosome IV clone Y116A8, *** SEQUENCING IN | Caenorhabditis elegans | 36,615 | 23-Jan-98 |
| | | | | | PROGRESS ***, in unordered pieces. | | | |
| | | GB_IN1: CEY116A8B | 29344 | AL021469 | Caenorhabditis elegans cosmid Y116A8B, complete sequence. | Caenorhabditis elegans | 36,615 | 23-Nov-98 |
| | | GB_HTG1: CEY116A8_4 | 110000 | Z98858 | Caenorhabditis elegans chromosome IV clone Y116A8, *** SEQUENCING IN | Caenorhabditis elegans | 36,615 | 23-Jan-98 |
| | | | | | PROGRESS ***, in unordered pieces. | | | |
| rxa02129 | 357 | GB_HTG5: AC007809 | 141122 | AC007809 | Drosophila melanogaster chromosome 3 clone BACR45M03 (D718) RPCI-98 45.M.3 | Drosophila melanogaster | 37,255 | 16-Nov-99 |
| | | | | | map 88C-88C strain y; cn bw sp, *** SEQUENCING IN PROGRESS ***, | | | |
| | | | | | 98 unordered pieces. | | | |
| | | GB_IN2: CELT02C5 | 36267 | U55374 | Caenorhabditis elegans cosmid T02C5. | Caenorhabditis elegans | 41,834 | 08-OCT-1999 |
| | | GB_IN1: CEZC101 | 26147 | Z93395 | Caenorhabditis elegans cosmid ZC101, complete sequence. | Caenorhabditis elegans | 38,873 | 23-Jul-99 |
| rxa02132 | | | | | | | | |
| rxa02137 | 921 | GB_EST16: C48630 | 360 | C48630 | C48630 Yuji Kohara unpublished cDNA: Strain N2 hermaphrodite embryo | Caenorhabditis elegans | 39,326 | 18-OCT-1999 |
| | | | | | Caenorhabditis elegans cDNA clone yk459c11 5′, mRNA sequence. | | | |
| | | GB_GSS12: AQ381854 | 597 | AQ381854 | RPCI11-137P5.TJ RPCI-11 Homo sapiens genomic clone RPCI-11-137P5, genomic | Homo sapiens | 37,879 | 21-MAY-1999 |
| | | | | | survey sequence. | | | |
| | | GB_HTG3: AC010253 | 74835 | AC010253 | Homo sapiens chromosome 5 clone CIT-HSPC_432B14, *** SEQUENCING IN | Homo sapiens | 35,082 | 15-Sep-99 |
| | | | | | PROGRESS ***, 34 unordered pieces. | | | |
| rxa02138 | 465 | GB_BA1: SC6G10 | 36734 | AL049497 | Streptomyces coelicolor cosmid 6G10. | Streptomyces coelicolor | 40,047 | 24-MAR-1999 |
| | | GB_BA1: MSGB1554CS | 36548 | L78814 | Mycobacterium leprae cosmid B1554 DNA sequence. | Mycobacterium leprae | 60,991 | 15-Jun-96 |
| | | GB_BA1: MSGB1551CS | 36548 | L78813 | Mycobacterium leprae cosmid B1551 DNA sequence. | Mycobacterium leprae | 60,991 | 15-Jun-96 |
| rxa02141 | 531 | GB_HTG2: AC003118 | 98940 | AC003118 | Homo sapiens chromosome 1, *** SEQUENCING IN PROGRESS ***, | Homo sapiens | 34,008 | 24-Nov-97 |
| | | | | | 3 unordered pieces. | | | |
| | | GB_HTG2: AC003118 | 98940 | AC003118 | Homo sapiens chromosome 1, *** SEQUENCING IN PROGRESS ***, | Homo sapiens | 34,008 | 24-Nov-97 |
| | | | | | 3 unordered pieces. | | | |
| | | GB_PR3: HS395P12 | 147724 | AL022310 | Human DNA sequence from clone 395P12 on chromosome 1q24-25. Contains the | Homo sapiens | 34,008 | 23-Nov-99 |
| | | | | | TXGP1 gene for tax-transcriptionally activated glycoprotein 1 (34 kD) (OX40 ligand, | | | |
| | | | | | OX40L) and a GOT2 (Aspartate Aminotransferase, mitochondrial precursor, | | | |
| | | | | | EC 2.6.1.1, Transaminase A, Glutamate Oxaloacetate Transaminase-2) pseudogene. | | | |
| | | | | | Contains ESTs, STSs and GSSs, complete sequence. | | | |
| rxa02146 | 750 | GB_BA1: SC6G10 | 36734 | AL049497 | Streptomyces coelicolor cosmid 6G10. | Streptomyces coelicolor | 36,167 | 24-MAR-1999 |
| | | GB_HTG6: AC008224 | 199774 | AC008224 | Drosophila melanogaster chromosome 3 clone BACR29J02 (D817) RPCI-98 29.J.2 | Drosophila melanogaster | 36,437 | 24-Nov-99 |
| | | | | | map 83D-83D strain y; cn bw sp, *** SEQUENCING IN PROGRESS***, | | | |
| | | | | | 37 unordered pieces. | | | |
| | | GB_GSS12: AQ407179 | 476 | AQ407179 | HS_5088_A2_G01_T7A RPCI-11 Human Male BAC Library Homo sapiens | Homo sapiens | 37,143 | 17-MAR-1999 |
| | | | | | genomic clone Plate = 664 Col = 2 Row = M, genomic survey sequence. | | | |
| rxa02151 | 1311 | GB_PR3: AC000074 | 44450 | AC000074 | Homo sapiens Chromosome 22q11.2 Cosmid Clone 20b In DGCR Region, | Homo sapiens | 37,798 | 31-OCT-1998 |
| | | | | | complete sequence. | | | |
| | | GB_PR2: HSAC002122 | 79931 | AC002122 | Human unknown clone GS293J04 from 5p15.2, complete sequence. | Homo sapiens | 36,064 | 27-MAY-1997 |
| | | GB_PR2: HSAC002122 | 79931 | AC002122 | Human unknown clone GS293J04 from 5p15.2, complete sequence. | Homo sapiens | 35,051 | 27-MAY-1997 |
| rxa02152 | 525 | GB_PAT: AR009990 | 2793 | AR009990 | Sequence 1 from patent US 5756677. | Unknown. | 44,311 | 04-DEC-1998 |
| | | GB_IN1: AF027735 | 3060 | AF027735 | Nephila clavipes minor ampullate silk protein MiSp1 mRNA, partial cds. | Nephila clavipes | 44,311 | 23-Apr-98 |
| | | GB_PAT: I95876 | 2793 | I95876 | Sequence 1 from patent US 5733771. | Unknown. | 44,311 | 01-DEC-1998 |
| rxa02163 | 876 | GB_PR3: HSJ1175I6 | 96276 | AL049538 | Human DNA sequence from clone 1175I6 on chromosome 20. Contains the gene for | Homo sapiens | 36,385 | 23-Nov-99 |
| | | | | | Ras inhibitor JC265 (Ras association (RalGDS/AF-6) domain containing protein), | | | |
| | | | | | ESTs, STSs, GSSs and two putative CpG islands, complete sequence. | | | |
| | | GB_GSS4: AQ690740 | 975 | AQ690740 | nbxb0082N18f CUGI Rice BAC Library Oryza sativa genomic clone nbxb0082N18f, | Oryza sativa | 39,474 | 1-Jul-99 |
| | | | | | genomic survey sequence. | | | |
| | | GB_PH: SVVWBORF | 6051 | X72092 | Streptomyces venezuelae bacteriophage VWB orfs. | Bacteriophage VWB | 41,416 | 24-Aug-95 |
| rxa02164 | 1698 | GB_BA2: AF000579 | 8931 | AF000579 | Bordetella bronchiseptica LysR transcriptional activator homolog (bbuR), urease | Bordetella bronchiseptica | 38,005 | 23-Feb-98 |
| | | | | | accessory protein D (ureD), urease structural subunit A (ureA), urease accessory | | | |
| | | | | | protein J (ureJ), urease structural subunits B (ureB) and C (ureC), urease | | | |
| | | | | | accessory proteins EF (ureEF) and G (ureG) genes, complete cds. | | | |
| | | GB_PR3: HS431P23 | 147971 | AL009178 | Human DNA sequence from clone 431P23 on chromosome 6q27. Contains the first | Homo sapiens | 35,604 | 23-Nov-99 |
| | | | | | coding exon of the MLLT4 gene for myeloid/lymphoid or mixed-lineage leukemia | | | |
| | | | | | (trithorax (Drosophila) homolog); translocated to, 4 (AF-6, Afadin, MLLT-4, ALL-1 | | | |
| | | | | | fusion partner), and a Serine Palmitoyltransferase 2 (EC 2.3.1.50, Long Chain | | | |
| | | | | | Base Biosynthesis protein 2, LCB-2, SPT-2) pseudogene. Contains ESTs, STss, GSSs, | | | |
| | | | | | and a putative CpG island, complete sequence. | | | |
| | | GB_PR2: AB016897 | 331211 | AB016897 | Homo sapiens genomic DNA, chromosome 6q27, complete sequence. | Homo sapiens | 38,314 | 20-Nov-99 |
| rxa02165 | 735 | GB_IN2: AF079177 | 2159 | AF079177 | Theileria parva strain KNP2 p67 surface antigen (p67) gene, complete cds. | Theileria parva | 39,207 | 09-MAR-1999 |
| | | GB_IN2: AF079176 | 2285 | AF079176 | Theileria parva strain Hluhluwe3 p67 surface antigen (p67) gene, complete cds. | Theileria parva | 39,049 | 09-MAR-1999 |
| | | GB_EST27: AI397572 | 482 | AI397572 | NCSC5G2T3 Subtracted Conidial Neurospora crassa cDNA clone SC5G2 5′, | Neurospora crassa | 38,936 | 8-Feb-99 |
| | | | | | mRNA sequence. | | | |
| rxa02166 | 300 | GB_BA1: MLCB1351 | 38936 | Z95117 | Mycobacterium leprae cosmid B1351. | Mycobacterium leprae | 37,627 | 24-Jun-97 |
| | | GB_BA1: MLCB1351 | 38936 | Z95117 | Mycobacterium leprae cosmid B1351. | Mycobacterium leprae | 40,741 | 24-Jun-97 |
| rxa02168 | 2937 | GB_BA1: MAFASGEN | 10520 | X87822 | B. ammoniagenes FAS gene. | Corynebacterium | 61,515 | 03-OCT-1996 |
| | | | | | | ammoniagenes | | |
| | | GB_BA1: MLCL458 | 43839 | AL049478 | Mycobacterium leprae cosmid L458. | Mycobacterium leprae | 50,292 | 27-Aug-99 |
| | | GB_PR3: HSL19H1 | 40145 | Z68164 | Human DNA sequence from cosmid L19H1, Huntington's Disease Region, | Homo sapiens | 37,621 | 23-Nov-99 |
| | | | | | chromosome 4p16.3, containing multiple EST matches. | | | |
| rxa02169 | 969 | GB_RO: MMA3CA212 | 4784 | X94406 | Mus musculus partial b3 gene for alpha3 subunit of L-type Ca2+ channel, exons 2-13. | Mus musculus | 37,620 | 24-Nov-99 |
| | | GB_RO: RATCACH3B | 2525 | M88751 | Rat calcium channel beta subunit-III mRNA, complete cds. | Rattus norvegicus | 36,345 | 27-MAY-1994 |
| | | GB_RO: MMU20372 | 2469 | U20372 | Mus musculus voltage-dependent calcium channel beta-3 subunit (CCHB3) mRNA, | Mus musculus | 36,865 | 02-MAR-1996 |
| | | | | | complete cds. | | | |
| rxa02170 | 897 | GB_HTG6: AC005497 | 212097 | AC005497 | Homo sapiens chromosome 17 clone RP11-952N18 map 17, *** SEQUENCING IN | Homo sapiens | 36,101 | 20-Nov-99 |
| | | | | | PROGRESS ***, 2 ordered pieces. | | | |
| | | GB_HTG6: AC005497 | 212097 | AC005497 | Homo sapiens chromosome 17 clone RP11-952N18 map 17, *** SEQUENCING IN | Homo sapiens | 37,570 | 20-Nov-99 |
| | | | | | PROGRESS ***, 2 ordered pieces. | | | |
| | | GB_PR2: AP000104 | 100000 | AP000104 | Homo sapiens genomic DNA of 21q22.1, GART and AML related, Q78C10-149C3 | Homo sapiens | 34,871 | 25-Sep-99 |
| | | | | | region, segment 7/20, complete sequence. | | | |
| rxa02172 | 462 | GB_EST24: AI170522 | 367 | AI170522 | EST216450 Normalized rat lung, Bento Soares Rattus sp. cDNA clone RLUCO75 | Rattus sp. | 38,904 | 20-Jan-99 |
| | | | | | 3′ end, mRNA sequence. | | | |
| | | GB_GSS13: AQ430048 | 538 | AQ430048 | HS_5061_B2_G09_T7A RPCI-11 Human Male BAC Library Homo | Homo sapiens | 37,143 | 31-MAR-1999 |
| | | | | | sapiens genomic clone Plate = 637 Col = 18 Row = N, genomic survey sequence. | | | |
| | | GB_GSS4: AQ701704 | 589 | AQ701704 | HS_2130_A1_E03_MR CIT Approved Human Genomic Sperm Library D Homo | Homo sapiens | 35,280 | 7-Jul-99 |
| | | | | | sapiens genomicclone Plate = 2130 Col = 5 Row = I, genomic survey sequence. | | | |
| rxa02177 | 1056 | GB_HTG4: AC009403 | 198495 | AC009403 | Homo sapiens clone DJ1015O24, *** SEQUENCING IN PROGRESS ***, | Homo sapiens | 37,154 | 28-OCT-1999 |
| | | | | | 3 unordered pieces. | | | |
| | | GB_HTG4: AC009403 | 198495 | AC009403 | Homo sapiens clone DJ1015O24, *** SEQUENCING IN PROGRESS ***, | Homo sapiens | 37,154 | 28-OCT-1999 |
| | | | | | 3 unordered pieces. | | | |
| | | GB_PR2: AP000094 | 100000 | AP000094 | Homo sapiens genomic DNA of 21q22.1, GART and AML related, B335D16-P10G11 | Homo sapiens | 38,536 | 25-Sep-99 |
| | | | | | region, segment 4/7, complete sequence. | | | |
| rxa02178 | | | | | | | | |
| rxa02180 | 1581 | GB_BA1: SC6C5 | 18160 | AL034492 | Streptomyces coelicolor cosmid 6C5. | Streptomyces coelicolor | 53,635 | 14-DEC-1998 |
| | | GB_HTG4: AC011121 | 172050 | AC011121 | Homo sapiens chromosome 11 clone 364_C_06 map 11, *** SEQUENCING IN | Homo sapiens | 37,170 | 14-OCT-1999 |
| | | | | | PROGRESS ***, 9 ordered pieces. | | | |
| | | GB_HTG4: AC011121 | 172050 | AC011121 | Homo sapiens chromosome 11 clone 364_C_06 map 11, *** SEQUENCING IN | Homo sapiens | 37,170 | 14-OCT-1999 |
| | | | | | PROGRESS ***, 9 ordered pieces. | | | |
| rxa02181 | 801 | GB_PL1: STU76701 | 3049 | U76701 | Solanum tuberosum NADH nitrate reductase (StNR2) mRNA, complete cds. | Solanum tuberosum | 38,846 | 18-Nov-96 |
| | | GB_EST36: AI896605 | 633 | AI896605 | EST266048 tomato callus, TAMU Lycopersicon esculentum cDNA clone | Lycopersicon esculentum | 39,671 | 27-Jul-99 |
| | | | | | cLEC16C12, mRNA sequence. | | | |
| | | GB_EST38: AW035744 | 620 | AW035744 | EST281898 tomato callus, TAMU Lycopersicon esculentum cDNA clone | Lycopersicon esculentum | 40,555 | 15-Sep-99 |
| | | | | | cLEC36M13, mRNA sequence. | | | |
| rxa02183 | | | | | | | | |
| rxa02185 | 702 | GB_BA1: MTV043 | 68848 | AL022004 | Mycobacterium tuberculosis H37Rv complete genome; segment 40/162. | Mycobacterium | 38,793 | 24-Jun-99 |
| | | | | | | tuberculosis | | |
| | | GB_BA1: MSGB1935CS | 40085 | L04666 | M. leprae genomic sequence, cosmid b1935. | Mycobacterium leprae | 38,067 | 14-Jun-96 |
| | | GB_BA1: MLCB57 | 38029 | Z99494 | Mycobacterium leprae cosmid B57. | Mycobacterium leprae | 38,067 | 10-Feb-99 |
| rxa02186 | 321 | GB_BA2: CNSPAX03 | 307120 | AJ248285 | Pyrococcus abyssi complete genome; segment 3/6. | Pyrococcus abyssi | 35,873 | 9-Sep-99 |
| | | GB_HTG3: AC010677 | 116108 | AC010677 | Homo sapiens clone MS2304L04, *** SEQUENCING IN PROGRESS ***, | Homo sapiens | 39,145 | 04-OCT-1999 |
| | | | | | 4 unordered pieces. | | | |
| | | GB_HTG3: AC010677 | 116108 | AC010677 | Homo sapiens clone MS2304L04, *** SEQUENCING IN PROGRESS ***, | Homo sapiens | 39,145 | 04-OCT-1999 |
| | | | | | 4 unordered pieces. | | | |
| rxa02187 | 2322 | GB_EST33: AI779784 | 362 | AI779784 | EST260663 tomato susceptible, Cornell Lycopersicon esculentum cDNA clone | Lycopersicon esculentum | 41,011 | 29-Jun-99 |
| | | | | | cLES9K1, mRNA sequence. | | | |
| | | GB_EST33: AI779784 | 362 | AI779784 | EST260663 tomato susceptible, Cornell Lycopersicon esculentum cDNA clone | Lycopersicon esculentum | 41,011 | 29-Jun-99 |
| | | | | | cLES9K1, mRNA sequence. | | | |
| rxa02199 | 693 | GB_PR3: AC005274 | 205150 | AC005274 | Homo sapiens chromosome 17, clone hRPK.1090_M_7, complete sequence. | Homo sapiens | 36,337 | 29-Jul-98 |
| | | GB_HTG2: AC007732 | 110348 | AC007732 | Homo sapiens chromosome 17 clone hRPC.1030_A_12 map 17, | Homo sapiens | 35,924 | 5-Jun-99 |
| | | | | | *** SEQUENCING IN PROGRESS ***, 7 unordered pieces. | | | |
| | | GB_IN1: DMU11052 | 4871 | U11052 | Drosophila melanogaster peroxidasin precursor mRNA, complete cds. | Drosophila melanogaster | 39,873 | 26-Jan-95 |
| rxa02203 | 501 | GB_EST17: AA642571 | 323 | AA642571 | nq73c08.s1 NCI_CGAP_Pr22 Homo sapiens cDNA clone IMAGE: 1157966 | Homo sapiens | 49,485 | 27-OCT-1997 |
| | | | | | 3′ similar to TR: G9372 G9372 UBIQUITIN;, mRNA sequence. | | | |
| | | GB_EST27: AI425489 | 312 | AI425489 | my32e11.y1 Barstead mouse pooled organs MPLRB4 Mus musculus cDNA clone | Mus musculus | 40,514 | 09-MAR-1999 |
| | | | | | IMAGE: 697580 5′, mRNA sequence. | | | |
| | | GB_EST23: AI154481 | 308 | AI154481 | ua03h07.r1 Soares 2NbMT Mus musculus cDNA clone IMAGE: 1345693 5′, | Mus musculus | 42,748 | 30-Sep-98 |
| | | | | | mRNA sequence. | | | |
| rxa02206 | 1059 | GB_PR2: AP000269 | 70932 | AP000269 | Homo sapiens genomic DNA, chromosome 21q22.1, D21S226-AML region, | Homo sapiens | 39,306 | 20-Nov-99 |
| | | | | | clone: T293, complete sequence. | | | |
| | | GB_PL1: D32140 | 1360 | D32140 | Cyanidioschyzon merolae DNA for actin, complete cds. | Cyanidioschyzon merolae | 37,331 | 7-Feb-99 |
| | | GB_PR2: AP000269 | 70932 | AP000269 | Homo sapiens genomic DNA, chromosome 21q22.1, D21S226-AML region, | Homo sapiens | 35,481 | 20-Nov-99 |
| | | | | | clone: T293, complete sequence. | | | |
| rxa02207 | 898 | GB_EST21: AA982901 | 442 | AA982901 | vx59f07.r1 Stratagene mouse macrophage (#937306) Mus musculus cDNA clone | Mus musculus | 42,141 | 27-MAY-1998 |
| | | | | | IMAGE: 1279525 5′ similar to gb: X59543_ma1RIBONUCLEOSIDE- | | | |
| | | | | | DIPHOSPHATE REDUCTASE M1 CHAIN (HUMAN); gb: K02927 Mouse | | | |
| | | | | | ribonucleotide reductase subunit M1 mRNA, complete (MOUSE);, mRNA sequence. | | | |
| | | GB_EST8: W85369 | 558 | W85369 | mf48h04.r1 Soares mouse embryo NbME13.5 14.5 Mus musculus cDNA clone | Mus musculus | 39,964 | 12-Sep-96 |
| | | | | | IMAGE: 408343 5′ similar to gb: K02927 Mouse ribonucleotide reductase subunit | | | |
| | | | | | M1 mRNA, complete (MOUSE);, mRNA sequence. | | | |
| | | GB_PAT: E14824 | 2379 | E14824 | cDNA encoding M1 subunit of human ribonucleotide reductase. | Homo sapiens | 36,812 | 28-Jul-99 |
| rxa02211 | | | | | | | | |
| rxa02212 | 621 | GB_HTG3: AC009518 | 241128 | AC009518 | Homo sapiens chromosome 7, *** SEQUENCING IN PROGRESS ***, | Homo sapiens | 36,542 | 1-Sep-99 |
| | | | | | 68 unordered pieces. | | | |
| | | GB_HTG3: AC009518 | 241128 | AC009518 | Homo sapiens chromosome 7, *** SEQUENCING IN PROGRESS ***, | Homo sapiens | 36,542 | 1-Sep-99 |
| | | | | | 68 unordered pieces. | | | |
| | | GB_HTG3: AC009518 | 241128 | AC009518 | Homo sapiens chromosome 7, *** SEQUENCING IN PROGRESS ***, | Homo sapiens | 41,362 | 1-Sep-99 |
| | | | | | 68 unordered pieces. | | | |
| rxa02216 | 329 | GB_HTG2: AC007641 | 102402 | AC007641 | Mus musculus chromosome 10 clone 644_M_8 map 10, *** SEQUENCING IN | Mus musculus | 31,307 | 22-MAY-1999 |
| | | | | | PROGRESS ***, 7 unordered pieces. | | | |
| | | GB_HTG2: AC007641 | 102402 | AC007641 | Mus musculus chromosome 10 clone 644_M_8 map 10, *** SEQUENCING IN | Mus musculus | 31,307 | 22-MAY-1999 |
| | | | | | PROGRESS ***, 7 unordered pieces. | | | |
| | | GB_HTG2: AC007641 | 102402 | AC007641 | Mus musculus chromosome 10 clone 644_M_8 map 10, *** SEQUENCING IN | Mus musculus | 32,198 | 22-MAY-1999 |
| | | | | | PROGRESS ***, 7 unordered pieces. | | | |
| rxa02217 | 786 | GB_RO: RNU91516 | 1540 | U91516 | Rattus norvegicus oxytocin receptor (OTR) gene, promoter region. | Rattus norvegicus | 36,256 | 25-Nov-97 |
| | | GB_RO: RNU91516 | 1540 | U91516 | Rattus norvegicus oxytocin receptor (OTR) gene, promoter region. | Rattus norvegicus | 37,176 | 25-Nov-97 |
| rxa02218 | 390 | GB_HTG3: AC008656 | 43033 | AC008656 | Homo sapiens chromosome 5 clone CIT978SKB_194J6, *** SEQUENCING IN | Homo sapiens | 39,894 | 3-Aug-99 |
| | | | | | PROGRESS ***, 64unordered pieces. | | | |
| | | GB_HTG3: AC008656 | 43033 | AC008656 | Homo sapiens chromosome 5 clone CIT978SKB_194J6, *** SEQUENCING IN | Homo sapiens | 39,894 | 3-Aug-99 |
| | | | | | PROGRESS ***, 64 unordered pieces. | | | |
| | | GB_HTG3: AC008656 | 43033 | AC008656 | Homo sapiens chromosome 5 clone CIT978SKB_194J6, *** SEQUENCING IN | Homo sapiens | 37,598 | 3-Aug-99 |
| | | | | | PROGRESS ***, 64 unordered pieces. | | | |
| rxa02219 | 1509 | GB_PR3: HS475N16 | 113109 | AL035587 | Human DNA sequence from clone 475N16 on chromosome 6p12.3-21.2, | Homo sapiens | 36,266 | 23-Nov-99 |
| | | | | | complete sequence. | | | |
| | | GB_PR3: HS475N16 | 113109 | AL035587 | Human DNA sequence from clone 475N16 on chromosome 6p12.3-21.2, complete | Homo sapiens | 35,255 | 23-Nov-99 |
| | | | | | sequence. | | | |
| | | GB_EST10: AA142336 | 411 | AA142336 | ms07f02.r1 Stratagene mouse skin (#937313) Mus musculus cDNA clone | Mus musculus | 38,398 | 12-Feb-97 |
| | | | | | IMAGE: 606267 5′ similar to SW: RCA1_YEAST P40341 MITOCHONDRIAL | | | |
| | | | | | RESPIRATORY CHAIN COMPLEXES ASSEMBLY PROTEIN RCA1;, mRNA | | | |
| | | | | | sequence. | | | |
| rxa02221 | 1485 | GB_PR3: AC002422 | 160091 | AC002422 | Human Chromosome X, complete sequence. | Homo sapiens | 38,435 | 30-Jan-98 |
| | | GB_HTG2: AC006755 | 199917 | AC006755 | Caenorhabditis elegans clone Y40C5, *** SEQUENCING IN | Caenorhabditis elegans | 39,229 | 23-Feb-99 |
| | | | | | PROGRESS ***, 1 unordered pieces. | | | |
| | | GB_HTG2: AC006755 | 199917 | AC006755 | Caenorhabditis elegans clone Y40C5, *** SEQUENCING IN PROGRESS ***, | Caenorhabditis elegans | 39,229 | 23-Feb-99 |
| | | | | | 1 unordered pieces. | | | |
| rxa02223 | 601 | GB_HTG6: AC008224 | 199774 | AC008224 | Drosophila melanogaster chromosome 3 clone BACR29J02 (D817) RPCI-98 29.J.2 | Drosophila melanogaster | 35,333 | 24-Nov-99 |
| | | | | | map 83D-83D strain y; cn bw sp, *** SEQUENCING IN PROGRESS ***, | | | |
| | | | | | 37 unordered pieces. | | | |
| | | GB_HTG3: AC011511 | 158296 | AC011511 | Homo sapiens chromosome 19 clone CITB-H1_2369P2, *** SEQUENCING IN | Homo sapiens | 35,593 | 07-OCT-1999 |
| | | | | | PROGRESS ***, 57 unordered pieces. | | | |
| | | GB_HTG3: AC011511 | 158296 | AC011511 | Homo sapiens chromosome 19 clone CITB-H1_2369P2, *** SEQUENCING IN | Homo sapiens | 35,593 | 07-OCT-1999 |
| | | | | | PROGRESS ***, 57 unordered pieces. | | | |
| rxa02226 | 1156 | GB_HTG2: AC006890 | 298195 | AC006890 | Caenorhabditis elegans clone Y67D8x, *** SEQUENCING IN PROGRESS ***, | Caenorhabditis elegans | 36,810 | 24-Feb-99 |
| | | | | | 23 unordered pieces. | | | |
| | | GB_HTG2: AC006890 | 298195 | AC006890 | Caenorhabditis elegans clone Y67D8x, *** SEQUENCING IN PROGRESS ***, | Caenorhabditis elegans | 35,433 | 24-Feb-99 |
| | | | | | 23 unordered pieces. | | | |
| | | GB_HTG2: AC006890 | 298195 | AC006890 | Caenorhabditis elegans clone Y67D8x, *** SEQUENCING IN PROGRESS ***, | Caenorhabditis elegans | 36,810 | 24-Feb-99 |
| | | | | | 23 unordered pieces. | | | |
| rxa02227 | 741 | GB_EST5: H98835 | 440 | H98835 | yx14f12.s1 Soares melanocyte 2NbHM Homo sapiens cDNA clone | Homo sapiens | 38,182 | 15-DEC-1995 |
| | | | | | IMAGE: 261743 3′, mRNA sequence. | | | |
| | | GB_EST5: N25530 | 586 | N25530 | yx76c03.s1 Soares melanocyte 2NbHM Homo sapiens cDNA clone IMAGE: | Homo sapiens | 37,543 | 29-DEC-1995 |
| | | | | | 267652 3′, mRNA sequence. | | | |
| | | GB_BA1: CGU43535 | 2531 | U43535 | Corynebacterium glutamicum multidrug resistance protein (cmr) gene, complete cds. | Corynebacterium | 38,812 | 9-Apr-97 |
| | | | | | | glutamicum | | |
| rxa02230 | 660 | GB_EST16: AA570388 | 527 | AA570388 | nk62c08.s1 NCI_CGAP_Sch1 Homo sapiens cDNA clone IMAGE: 1018094 | Homo sapiens | 41,096 | 9-Sep-97 |
| | | | | | 3′ similar to contains element MSR1 repetitive element;, mRNA sequence. | | | |
| | | GB_PR2: HSU43030 | 1539 | U43030 | Human cardiotrophin-1 (CTF1) mRNA, | Homo sapiens | 36,335 | 9-Jan-96 |
| | | | | | complete cds. | | | |
| | | GB_IN1: CELK08B5 | 35728 | U41022 | Caenorhabditis elegans cosmid K08B5. | Caenorhabditis elegans | 35,387 | 30-Nov-95 |
| rxa02231 | 879 | GB_PL2: ATAC006429 | 94818 | AC006429 | Arabidopsis thaliana chromosome II BAC F15K19 genomic sequence, | Arabidopsis thaliana | 33,687 | 23-Apr-99 |
| | | | | | complete sequence. | | | |
| | | GB_PR3: AC004554 | 195142 | AC004554 | Homo sapiens Xp22 BAC GSHB-590J6 (Genome Systems Human BAC library) | Homo sapiens | 38,921 | 30-MAY-1998 |
| | | | | | complete sequence. | | | |
| | | GB_HTG2: AC007853 | 116280 | AC007853 | Drosophila melanogaster chromosome 3 clone BACR03L02 (D766) RPCI-98 03.L.2 | Drosophila melanogaster | 36,237 | 2-Aug-99 |
| | | | | | map 96B-96C strain y; cn bw sp, *** SEQUENCING IN PROGRESS ***, | | | |
| | | | | | 80 unordered pieces. | | | |
| rxa02238 | 408 | GB_BA1: MTCY21B4 | 39150 | Z80108 | Mycobacterium tuberculosis H37Rv complete genome; segment 62/162. | Mycobacterium | 52,206 | 23-Jun-98 |
| | | | | | | tuberculosis | | |
| | | GB_BA1: MTCY21B4 | 39150 | Z80108 | Mycobacterium tuberculosis H37Rv complete genome; segment 62/162. | Mycobacterium | 36,935 | 23-Jun-98 |
| | | | | | | tuberculosis | | |
| | | GB_VI: AF105451 | 801 | AF105451 | HIV-1 isolate A-DII-07 from Italy, envelope glycoprotein, C2-V5 region (env) gene, | Human immunodeficiency | 40,864 | 25-Apr-99 |
| | | | | | partial cds. | virus type 1 | | |
| rxa02244 | 1656 | GB_PR1: AB016195 | 10558 | AB016195 | Homo sapiens ELK1 pseudogene (ELK2) and immunoglobulin heavy chain gamma | Homo sapiens | 38,929 | 9-Apr-99 |
| | | | | | pseudogene (IGHGP). | | | |
| | | GB_PR3: HSN21F1 | 39212 | Z94162 | Human DNA sequence from cosmid N21F1 on chromosome 22 Contains exon trap and | Homo sapiens | 38,763 | 23-Nov-99 |
| | | | | | STS, complete sequence. | | | |
| | | GB_IN1: DMAC001648 | 51989 | AC001648 | Drosophila melanogaster (P1 DS03431 (D102)) DNA sequence, complete sequence. | Drosophila melanogaster | 36,884 | 22-Apr-97 |
| rxa02254 | 800 | GB_GSS12: AQ360240 | 541 | AQ360240 | HS_5035_A2_E07_T7 RPCI11 Human Male BAC Library Homo sapiens | Homo sapiens | 36,386 | 06-MAR-1999 |
| | | | | | genomic clone Plate = 611 Col = 14 Row = I, genomic survey sequence. | | | |
| | | GB_GSS11: AQ258453 | 620 | AQ258453 | nbxb0020L15f CUGI Rice BAC Library Oryza sativa genomic clone nbxb0020L15f, | Oryza sativa | 36,271 | 23-OCT-1998 |
| | | | | | genomic survey sequence. | | | |
| | | GB_GSS14: AQ577777 | 568 | AQ577777 | nbxb0091L17f CUGI Rice BAC Library Oryza sativa genomic clone nbxb0091L17f, | Oryza sativa | 39,456 | 2-Jun-99 |
| | | | | | genomic survey sequence. | | | |
| rxa02255 | 1059 | GB_PR4: AC006332 | 153477 | AC006332 | Homo sapiens clone NH0376O14, complete sequence. | Homo sapiens | 35,019 | 11-Nov-99 |
| | | GB_PAT: E02669 | 1197 | E02669 | DNA encoding Bacillus sp. L-lactic acid dehydrogenase. | Bacillus sp. | 39,719 | 29-Sep-97 |
| | | GB_PL1: YSCBOI2 | 3201 | D38310 | Yeast BOI2 gene for Boi2p. | Saccharomyces cerevisiae | 35,769 | 8-Feb-99 |
| rxa02266 | 636 | GB_BA1: REGIONB | 4961 | Z13995 | N. meningitidis lipA and lipB genes for LipA and LipB proteins. | Neisseria meningitidis | 35,691 | 29-DEC-1993 |
| | | GB_HTG1: AP000568 | 136627 | AP000568 | Homo sapiens chromosome 21 clone B753B2 map 21q21.2, *** SEQUENCING | Homo sapiens | 37,500 | 07-OCT-1999 |
| | | | | | IN PROGRESS ***, in unordered pieces. | | | |
| | | GB_HTG1: AP000568 | 136627 | AP000568 | Homo sapiens chromosome 21 clone B753B2 map 21q21.2, *** SEQUENCING | Homo sapiens | 37,500 | 07-OCT-1999 |
| | | | | | IN PROGRESS ***, in unordered pieces. | | | |
| rxa02267 | 996 | GB_PR4: AC007283 | 127361 | AC007283 | Homo sapiens clone NH0536I18, complete sequence. | Homo sapiens | 37,155 | 28-Sep-99 |
| | | GB_IN1: CEC54C6 | 35500 | Z77131 | Caenorhabditis elegans cosmid C54C6, complete sequence. | Caenorhabditis elegans | 38,280 | 23-Nov-98 |
| | | GB_HTG3: AC008905 | 129915 | AC008905 | Homo sapiens chromosome 5 clone CITB-H1_2259I14, *** SEQUENCING | Homo sapiens | 35,895 | 3-Aug-99 |
| | | | | | IN PROGRESS ***, 40 unordered pieces. | | | |
| rxa02271 | 681 | GB_HTG3: AC007441 | 219832 | AC007441 | Drosophila melanogaster chromosome 3 clone BACR10E03 (D690) RPCI-98 10.E.3 | Drosophila melanogaster | 33,284 | 08-OCT-1999 |
| | | | | | map 88A-88B strain y; cn bw sp, *** SEQUENCING IN PROGRESS***, | | | |
| | | | | | 188 unordered pieces. | | | |
| | | GB_HTG3: AC007441 | 219832 | AC007441 | Drosophila melanogaster chromosome 3 clone BACR10E03 (D690) RPCI-98 10.E.3 | Drosophila melanogaster | 33,284 | 08-OCT-1999 |
| | | | | | map 88A-88B strain y; cn bw sp, *** SEQUENCING IN PROGRESS ***, | | | |
| | | | | | 188 unordered pieces. | | | |
| | | GB_HTG2: AC008029 | 123186 | AC008029 | Drosophila melanogaster chromosome 3 clone BACR01C11 (D819) RPCI-98 01.C.11 | Drosophila melanogaster | 34,315 | 2-Aug-99 |
| | | | | | map 84D-84D strain y; cn bw sp, *** SEQUENCING IN PROGRESS ***, | | | |
| | | | | | 92 unordered pieces. | | | |
| rxa02279 | 1581 | GB_IN1: AC003121 | 69822 | AC003121 | Drosophila melanogaster (P1 DS00329 (D89)) DNA sequence, complete sequence. | Drosophila melanogaster | 38,046 | 26-Nov-97 |
| | | GB_IN1: AC003121 | 69822 | AC003121 | Drosophila melanogaster (P1 DS00329 (D89)) DNA sequence, complete sequence. | Drosophila melanogaster | 39,220 | 26-Nov-97 |
| | | GB_BA1: MTCY39 | 38500 | Z74025 | Mycobacterium tuberculosis H37Rv complete genome; segment 89/162. | Mycobacterium | 39,685 | 17-Jun-98 |
| | | | | | | tuberculosis | | |
| rxa02280 | | | | | | | | |
| rxa02286 | 672 | GB_BA1: MTV025 | 121125 | AL022121 | Mycobacterium tuberculosis H37Rv complete genome; segment 155/162. | Mycobacterium | 36,953 | 24-Jun-99 |
| | | | | | | tuberculosis | | |
| | | GB_PL2: AC002130 | 114738 | AC002130 | The sequence of BAC F1N21 from Arabidopsis thaliana chromosome 1, | Arabidopsis thaliana | 39,216 | 8-Jan-98 |
| | | | | | complete sequence. | | | |
| | | GB_PL2: AC007259 | 97146 | AC007259 | Arabidopsis thaliana chromosome I BAC T28P6 genomic sequence, | Arabidopsis thaliana | 36,090 | 17-Aug-99 |
| | | | | | complete sequence. | | | |
| rxa02287 | 675 | GB_HTG3: AC009281 | 221178 | AC009281 | Homo sapiens chromosome 15 clone 8_C_22 map 15, *** SEQUENCING | Homo sapiens | 35,565 | 12-Aug-99 |
| | | | | | IN PROGRESS ***, 49 unordered pieces. | | | |
| | | GB_HTG3: AC009281 | 221178 | AC009281 | Homo sapiens chromosome 15 clone 8_C_22 map 15, *** SEQUENCING | Homo sapiens | 35,565 | 12-Aug-99 |
| | | | | | IN PROGRESS ***, 49 unordered pieces. | | | |
| | | GB_RO: MUSMURINC | 4597 | M65736 | Mouse murinoglobulin mRNA, complete cds. | Mus musculus | 38,485 | 27-Apr-93 |
| rxa02294 | 498 | GB_EST19: AA813194 | 398 | AA813194 | ai80g12.s1 Soares_testis_NHT Homo sapiens cDNA clone 1377190 3′, | Homo sapiens | 36,797 | 31-DEC-1998 |
| | | | | | mRNA sequence. | | | |
| | | GB_EST19: AA813194 | 398 | AA813194 | ai80g12.s1 Soares_testis_NHT Homo sapiens cDNA clone 1377190 3′, | Homo sapiens | 33,417 | 31-DEC-1998 |
| | | | | | mRNA sequence. | | | |
| rxa02295 | 903 | GB_PAT: I89451 | 18318 | I89451 | Sequence 6 from patent U.S. Pat. No. 5721354. | Unknown. | 38,839 | 10-Aug-98 |
| | | GB_VI: HCU33331 | 18535 | U33331 | Human cytomegalovirus Toledo strain UL/b′ region. | human herpesvirus 5 | 38,839 | 27-Jan-96 |
| | | GB_PR3: HS550H1 | 108803 | AL035420 | Human DNA sequence from clone 550H1 on chromosome 20q11.1-11.22 Contains | Homo sapiens | 38,796 | 23-Nov-99 |
| | | | | | a pseudogene similar to HIGH MOBILITY GROUP PROTEIN 2A, a novel mRNA, | | | |
| | | | | | ESTs, STSs, GSSs and CpG Islands, complete sequence. | | | |
| rxa02296 | 612 | GB_BA2: AF065312 | 1694 | AF065312 | Yersinia pestis hypothetical protein (yceG) gene, partial cds; thymidylate | Yersinia pestis | 41,351 | 16-Nov-99 |
| | | | | | kinase (tmk) gene, complete cds; and putative DNA polymerase III delta' subunit | | | |
| | | | | | (holB) gene, partial cds. | | | |
| | | GB_PR3: HS550H1 | 108803 | AL035420 | Human DNA sequence from clone 550H1 on chromosome 20q11.1-11.22 Contains | Homo sapiens | 37,919 | 23-Nov-99 |
| | | | | | a pseudogene similar to HIGH MOBILITY GROUP PROTEIN 2A, | | | |
| | | | | | a novel mRNA, ESTs, STSs, GSSs and CpG Islands, complete sequence. | | | |
| | | GB_PR3: HS550H1 | 108803 | AL035420 | Human DNA sequence from clone 550H1 on chromosome 20q11.1-11.22 Contains | Homo sapiens | 37,607 | 23-Nov-99 |
| | | | | | a pseudogene similar to HIGH MOBILITY GROUP PROTEIN 2A, a novel mRNA, | | | |
| | | | | | ESTs, STSs, GSSs and CpG Islands, complete sequence. | | | |
| rxa02297 | 1260 | GB_BA2: AF065312 | 1694 | AF065312 | Yersinia pestis hypothetical protein (yceG) gene, partial cds; thymidylate | Yersinia pestis | 39,683 | 16-Nov-99 |
| | | | | | kinase (tmk) gene, complete cds; and putative DNA polymerase III delta' subunit | | | |
| | | | | | (holB) gene, partial cds. | | | |
| | | GB_RO: AF007836 | 5655 | AF007836 | Rattus norvegicus rab3 effector (RIM) mRNA, alternatively spliced, complete cds. | Rattus norvegicus | 37,844 | 15-Aug-97 |
| | | GB_IN2: EGU27015 | 2394 | U27015 | Echinococcus granulosus 18S ribosomal RNA gene, complete sequence. | Echinococcus granulosus | 38,710 | 16-Jul-96 |
| rxa02298 | 1782 | GB_BA2: AF116184 | 540 | AF116184 | Corynebacterium glutamicum L-aspartate-alpha-decarboxylase precursor (panD) | Corynebacterium | 44,231 | 02-MAY-1999 |
| | | | | | gene, complete cds. | glutamicum | | |
| | | GB_BA2: AF116184 | 540 | AF116184 | Corynebacterium glutamicum L-aspartate-alpha-decarboxylase precursor (panD) | Corynebacterium | 42,007 | 02-MAY-1999 |
| | | | | | gene, complete cds. | glutamicum | | |
| rxa02300 | 456 | GB_BA2: AF116184 | 540 | AF116184 | Corynebacterium glutamicum L-aspartate-alpha-decarboxylase precursor (panD) gene, | Corynebacterium | 46,250 | 02-MAY-1999 |
| | | | | | complete cds. | glutamicum | | |
| | | GB_BA1: MTV004 | 69350 | AL009198 | Mycobacterium tuberculosis H37Rv complete genome; segment 144/162. | Mycobacterium | 39,602 | 18-Jun-98 |
| | | | | | | tuberculosis | | |
| | | GB_EST22: AI048692 | 172 | AI048692 | ub30g04.r1 Soares 2NbMT Mus musculus cDNA clone IMAGE: 1379286 5′, | Mus musculus | 43,284 | 8-Jul-98 |
| | | | | | mRNA sequence. | | | |
| rxa02301 | 840 | GB_HTG3: AC008573 | 205755 | AC008573 | Homo sapiens chromosome 5 clone CIT-HSPC_551I11, *** SEQUENCING | Homo sapiens | 35,115 | 3-Aug-99 |
| | | | | | IN PROGRESS ***, 95 unordered pieces. | | | |
| | | GB_HTG3: AC008573 | 205755 | AC008573 | Homo sapiens chromosome 5 clone CIT-HSPC_551I11, *** SEQUENCING | Homo sapiens | 35,115 | 3-Aug-99 |
| | | | | | IN PROGRESS ***, 95 unordered pieces. | | | |
| | | GB_HTG3: AC008573 | 205755 | AC008573 | Homo sapiens chromosome 5 clone CIT-HSPC_551I11, *** SEQUENCING | Homo sapiens | 36,527 | 3-Aug-99 |
| | | | | | IN PROGRESS ***, 95 unordered pieces. | | | |
| rxa02302 | 1002 | GB_HTG6: AC008076 | 200000 | AC008076 | Homo sapiens chromosome 4, *** SEQUENCING IN PROGRESS ***, | Homo sapiens | 34,884 | 02-DEC-1999 |
| | | | | | 18 unordered pieces. | | | |
| | | GB_HTG3: AC008930 | 258026 | AC008930 | Homo sapiens chromosome 5 clone CITB-H1_2292M9, *** SEQUENCING | Homo sapiens | 36,945 | 3-Aug-99 |
| | | | | | IN PROGRESS ***, 166 unordered pieces. | | | |
| | | GB_HTG3: AC008930 | 258026 | AC008930 | Homo sapiens chromosome 5 clone CITB-H1_2292M9, *** SEQUENCING | Homo sapiens | 36,945 | 3-Aug-99 |
| | | | | | IN PROGRESS ***, 166 unordered pieces. | | | |
| rxa02303 | | | | | | | | |
| rxa02304 | 1014 | GB_PAT: A69720 | 53789 | A69720 | Sequence 3 from Patent WO9807868. | unidentified | 36,915 | 07-MAY-1999 |
| | | GB_BA1: AMM223012 | 53784 | AJ223012 | Amycolatopsis mediterranei genes encoding rifamycin polyketide synthases, | Amycolatopsis | 36,915 | 9-Feb-98 |
| | | | | | ORFs 1 to 5. | mediterranei | | |
| | | GB_BA2: AF040570 | 76199 | AF040570 | Amycolatopsis mediterranei rifamycin biosynthetic | Amycolatopsis | 36,915 | 5-Feb-98 |
| | | | | | gene cluster. | mediterranei | | |
| rxa02307 | | | | | | | | |
| rxa02308 | 552 | GB_HTG3: AC009340 | 110415 | AC009340 | Drosophila melanogaster chromosome 2 clone BACR04E19 (D1026) | Drosophila melanogaster | 36,066 | 27-Aug-99 |
| | | | | | RPCI-98 04.E.19 map 34A-34E strain y; cn bw sp, *** SEQUENCING | | | |
| | | | | | IN PROGRESS ***, 103 unordered pieces. | | | |
| | | GB_HTG3: AC009340 | 110415 | AC009340 | Drosophila melanogaster chromosome 2 clone BACR04E19 (D1026) | Drosophila melanogaster | 36,066 | 27-Aug-99 |
| | | | | | RPCI-98 04.E. 19 map 34A-34E strain y; cn bw sp, *** SEQUENCING | | | |
| | | | | | IN PROGRESS ***, 103 unordered pieces. | | | |
| | | GB_IN2: AC005656 | 48443 | AC005656 | Drosophila melanogaster, chromosome 2R, region 34B6-34C2, P1 clone DS08787, | Drosophila melanogaster | 46,154 | 6-Feb-99 |
| | | | | | complete sequence. | | | |
| rxa02314 | 564 | GB_HTG5: AC011247 | 206436 | AC011247 | Homo sapiens clone NH0541E12, WORKING DRAFT SEQUENCE, | Homo sapiens | 36,201 | 13-Nov-99 |
| | | | | | 1 unordered pieces. | | | |
| | | GB_HTG5: AC011247 | 206436 | AC011247 | Homo sapiens clone NH0541E12, WORKING DRAFT SEQUENCE, | Homo sapiens | 35,036 | 13-Nov-99 |
| | | | | | 1 unordered pieces. | | | |
| | | GB_HTG3: AC011152 | 142616 | AC011152 | Homo sapiens clone 7_H_4, LOW-PASS | Homo sapiens | 35,548 | 01-OCT-1999 |
| | | | | | SEQUENCE SAMPLING. | | | |
| rxa02324 | 1209 | GB_BA2: AF110185 | 20302 | AF110185 | Burkholderia pseudomallei strain 1026b DbhB (dbhB), general secretory pathway | Burkholderia pseudomallei | 39,670 | 2-Aug-99 |
| | | | | | protein D (gspD), general secretory pathway protein E (gspE), general | | | |
| | | | | | secretory pathway protein F (gspF), GspC (gspC), general secretory | | | |
| | | | | | pathway protein G (gspG), general secretory pathway protein H (gspH), | | | |
| | | | | | general secretory pathway protein I (gspI), | | | |
| | | | | | general secretory pathway protein J (gspJ), general | | | |
| | | | | | secretory pathway protein K (gspK), general secretory | | | |
| | | | | | pathway protein L (gspL), general secretory pathway protein M (gspM), | | | |
| | | | | | and general secretory pathway protein N (gspN) genes, | | | |
| | | | | | complete cds; and unknown genes. | | | |
| | | GB_BA1: PSEAMNH | 5215 | D90216 | P. chlororaphis genes for amidase (EC 3.5.1.4) and for nitrile hydratase (EC 4.2.1.84). | Pseudomonas chlororaphis | 51,254 | 7-Feb-99 |
| | | GB_PAT: E12519 | 4775 | E12519 | Nucleotide sequence of Rhodococcus rhodochrous genomic DNA region | Rhodococcus rhodochrous | 51,646 | 24-Jun-98 |
| | | | | | containing amidase and nitrilehydratase genes. | | | |
| rxa02325 | 990 | GB_BA1: CGPYC | 3728 | Y09548 | Corynebacterium glutamicum pyc gene. | Corynebacterium | 100,000 | 08-MAY-1998 |
| | | | | | | glutamicum | | |
| | | GB_PR4: AC006079 | 178109 | AC006079 | Homo sapiens chromosome 17, clone hRPK.855_D_21, complete sequence. | Homo sapiens | 37,807 | 12-DEC-1998 |
| | | GB_GSS8: AQ036832 | 441 | AQ036832 | CIT-HSP-2334L1.TF CIT-HSP Homo sapiens genomic clone 2334L1, genomic | Homo sapiens | 42,359 | 11-Jul-98 |
| | | | | | survey sequence. | | | |
| rxa02331 | 489 | GB_PL1: YSKGA11 | 4159 | M68870 | Kluyveromyces lactis transcriptional activator (GAL11) gene, complete cds. | Kluyveromyces lactis | 40,252 | 14-MAY-1993 |
| | | GB_PR2: HSAY18950 | 584 | Y18950 | Homo sapiens partial gene for caspase-9, intronic sequence (584 bp). | Homo sapiens | 40,529 | 08-OCT-1999 |
| | | GB_PL1: YSKGA11 | 4159 | M68870 | Kluyveromyces lactis transcriptional activator (GAL11) gene, complete cds. | Kluyveromyces lactis | 38,679 | 14-MAY-1993 |
| rxa02336 | 303 | GB_BA1: CGU35023 | 3195 | U35023 | Corynebacterium glutamicum thiosulfate sulfurtransferase (thtR) gene, partial | Corynebacterium | 35,548 | 16-Jan-97 |
| | | | | | cds, acyl CoA carboxylase (accBC) gene, complete cds. | glutamicum | | |
| | | GB_PL2: AF114171 | 183990 | AF114171 | Sorghum bicolor BAC clone 25.M18, complete sequence. | Sorghum bicolor | 41,414 | 25-Apr-99 |
| | | GB_PR4: AC006324 | 157310 | AC006324 | Homo sapiens clone DJ1164F05, complete sequence. | Homo sapiens | 41,786 | 11-Nov-99 |
| rxa02337 | 1446 | GB_BA1: CGU35023 | 3195 | U35023 | Corynebacterium glutamicum thiosulfate sulfurtransferase (thtR) gene, partial | Corynebacterium | 100,000 | 16-Jan-97 |
| | | | | | cds, acyl CoA carboxylase (accBC) gene, complete cds. | glutamicum | | |
| | | GB_BA1: MTCY22G8 | 22550 | Z95585 | Mycobacterium tuberculosis H37Rv complete genome; segment 49/162. | Mycobacterium | 38,072 | 17-Jun-98 |
| | | | | | | tuberculosis | | |
| | | GB_PR2: HSAY18950 | 584 | Y18950 | Homo sapiens partial gene for caspase-9, intronic sequence (584 bp). | Homo sapiens | 42,949 | 08-OCT-1999 |
| rxa02339 | 515 | GB_PR2: HS149A16 | 173354 | AL021937 | Human DNA sequence from clone 149A16 on chromosome 22q12-13. | Homo sapiens | 37,376 | 23-Nov-99 |
| | | | | | Contains an IGLC (Immunoglobulin Lambda Chain C) pseudogene, the RFPL3 | | | |
| | | | | | and RFPL3S genes for Ret finger protein-like 3 and Ret finger | | | |
| | | | | | protein-like 3 antisense respectively, a gene for a novel | | | |
| | | | | | Immunobiobulin Lambda Chain V family protein, a novel gene | | | |
| | | | | | for a protein similar to mouse RGDS (RALGDS, | | | |
| | | | | | RALGEF, Guanine Nucleotide Dissociation Stimulator A) | | | |
| | | | | | and rabbit oncogene RSC, a novel gene for | | | |
| | | | | | the human ortholog of worm F16A11.2 and bacterial and | | | |
| | | | | | archea-bacterial predicted proteins, a novel | | | |
| | | | | | gene for a protein similar to BPI (Bacterial Permeability- | | | |
| | | | | | Increasing Protein) and rabbit LBP (Liposaccharide- | | | |
| | | | | | Binding Protein), and a the 5′ part of a novel gene. | | | |
| | | | | | Contains ESTs, STSs, GSSs, genomic marker D22S1175, | | | |
| | | | | | a ca repeat polymorphism and putative CpG islands, complete | | | |
| | | | | | sequence. | | | |
| | | GB_HTG3: AC009726 | 177618 | AC009726 | Homo sapiens chromosome 18 clone 263_O_14 map 18, *** SEQUENCING | Homo sapiens | 37,037 | 29-Aug-99 |
| | | | | | IN PROGRESS ***, 12 unordered pieces. | | | |
| | | GB_HTG3: AC009726 | 177618 | AC009726 | Homo sapiens chromosome 18 clone 263_O_14 map 18, *** SEQUENCING | Homo sapiens | 37,037 | 29-Aug-99 |
| | | | | | IN PROGRESS ***, 12 unordered pieces. | | | |
| rxa02340 | 1188 | GB_VI: AF063866 | 236120 | AF063866 | Melanoplus sanguinipes entomopoxvirus, complete genome. | Melanoplus sanguinipes | 34,480 | 22-DEC-1998 |
| | | | | | | entomopoxvirus | | |
| | | GB_HTG4: AC011089 | 171283 | AC011089 | Homo sapiens chromosome 2 clone 303_K_20 map 2, *** SEQUENCING | Homo sapiens | 37,757 | 14-OCT-1999 |
| | | | | | IN PROGRESS ***, 25 ordered pieces. | | | |
| | | GB_HTG4: AC011089 | 171283 | AC011089 | Homo sapiens chromosome 2 clone 303_K_20 map 2, *** SEQUENCING | Homo sapiens | 37,757 | 14-OCT-1999 |
| | | | | | IN PROGRESS ***, 25 ordered pieces. | | | |
| rxa02341 | 609 | GB_GSS14: AQ580594 | 303 | AQ580594 | RPCI-11-452K5.TJ RPCI-11 Homo sapiens genomic clone RPCI-11-452K5, | Homo sapiens | 38,305 | 7-Jun-99 |
| | | | | | genomic survey sequence. | | | |
| | | GB_GSS12: AQ393454 | 561 | AQ393454 | CITBI-E1-2556E3.TR CITBI-E1 Homo sapiens genomic clone 2556E3, genomic | Homo sapiens | 37,882 | 06-MAR-1999 |
| | | | | | survey sequence. | | | |
| | | GB_GSS14: AQ507468 | 627 | AQ507468 | RPCI-11-298O19.TJ RPCI-11 Homo sapiens genomic clone RPCI-11-298O19, | Homo sapiens | 38,480 | 29-Apr-99 |
| | | | | | genomic survey sequence. | | | |
| rxa02347 | 444 | GB_PR3: AC005549 | 147416 | AC005549 | Homo sapiens chromosome 17, clone hRPK.215_E_13, complete sequence. | Homo sapiens | 39,909 | 22-Sep-98 |
| | | GB_PR3: AC005549 | 147416 | AC005549 | Homo sapiens chromosome 17, clone hRPK.215_E_13, complete sequence. | Homo sapiens | 33,784 | 22-Sep-98 |
| | | GB_GSS8: B92789 | 742 | B92789 | CIT-HSP-2164J8.TR CIT-HSP Homo sapiens genomic clone 2164J8, genomic | Homo sapiens | 39,409 | 25-Jun-98 |
| | | | | | survey sequence. | | | |
| rxa02349 | | | | | | | | |
| rxa02352 | 578 | GB_EST19: AA738949 | 396 | AA738949 | vv68d12.r1 Stratagene mouse skin (#937313) Mus musculus cDNA clone | Mus musculus | 36,023 | 14-Jan-98 |
| | | | | | IMAGE: 1227575 5′, mRNA sequence. | | | |
| | | GB_GSS14: AQ526017 | 500 | AQ526017 | HS_5329_A2_F02_T7A RPCI-11 Human Male BAC Library Homo sapiens | Homo sapiens | 38,537 | 11-MAY-1999 |
| | | | | | genomic clone Plate = 905 Col = 4 Row = K, genomic survey sequence. | | | |
| | | GB_PR3: U82695 | 167460 | U82695 | Homo sapiens cosmid LM1937 from Xq28. | Homo sapiens | 38,421 | 3-Jan-98 |
| rxa02356 | 1119 | GB_BA1: MTCY16B7 | 43430 | Z81331 | Mycobacterium tuberculosis H37Rv complete genome; segment 123/162. | Mycobacterium | 39,087 | 17-Jun-98 |
| | | | | | | tuberculosis | | |
| | | GB_BA1: SRMSIK | 2384 | Y08921 | S. reticuli gene encoding Msik protein and orf1. | Streptomyces reticuli | 58,356 | 21-MAR-1997 |
| | | GB_BA1: MSGY414A | 40121 | AD000007 | Mycobacterium tuberculosis sequence from clone y414a. | Mycobacterium | 58,423 | 03-DEC-1996 |
| | | | | | | tuberculosis | | |
| rxa02358 | 414 | GB_BA1: BSUB0021 | 215534 | Z99124 | Bacillus subtilis complete genome (section 21 of 21): from 3999281 to 4214814. | Bacillus subtilis | 36,829 | 26-Nov-97 |
| | | GB_PR3: HSDA22P16 | 103367 | AL049641 | Human DNA sequence *** SEQUENCING IN PROGRESS *** from | Homo sapiens | 36,430 | 23-Nov-99 |
| | | | | | clone DA22P16, complete sequence. | | | |
| | | GB_BA1: BSUB0021 | 215534 | Z99124 | Bacillus subtilis complete genome (section 21 of 21): from 3999281 to 4214814. | Bacillus subtilis | 37,440 | 26-Nov-97 |
| rxa02360 | 2556 | GB_EST21: AA970555 | 420 | AA970555 | oo94h05.s1 NCI_CGAP_Kid5 Homo sapiens cDNA clone IMAGE: | Homo sapiens | 36,905 | 20-MAY-1998 |
| | | | | | 1573881 3′ similar to gb: X61970 PROTEASOME | | | |
| | | | | | ZETA CHAIN (HUMAN);, mRNA sequence. | | | |
| | | GB_GSS4: AQ739589 | 909 | AQ739589 | HS_5381_B2_G06_T7A RPCI-11 Human Male BAC Library | Homo sapiens | 44,912 | 16-Jul-99 |
| | | | | | Homo sapiens genomic clone Plate = 957 Col = 12 Row = N, | | | |
| | | | | | genomic survey sequence. | | | |
| | | GB_IN1: CEY53H1C | 37004 | AL117201 | Caenorhabditis elegans cosmid Y53H1C, complete sequence. | Caenorhabditis elegans | 38,436 | 19-Nov-99 |
| rxa02361 | 774 | GB_IN2: CELK04F10 | 35413 | AF039719 | Caenorhabditis elegans cosmid K04F10. | Caenorhabditis elegans | 36,891 | 26-MAY-1999 |
| | | GB_PL1: AB011477 | 78181 | AB011477 | Arabidopsis thaliana genomic DNA, chromosome 5, P1 clone: MHK7, | Arabidopsis thaliana | 37,095 | 20-Nov-99 |
| | | | | | complete sequence. | | | |
| | | GB_PL1: AB011477 | 78181 | AB011477 | Arabidopsis thaliana genomic DNA, chromosome 5, P1 clone: MHK7, | Arabidopsis thaliana | 36,794 | 20-Nov-99 |
| | | | | | complete sequence. | | | |
| rxa02362 | 3822 | GB_EST10: AA178985 | 357 | AA178985 | zp12g08.s1 Stratagene fetal retina 937202 Homo sapiens cDNA clone IMAGE: | Homo sapiens | 39,875 | 31-DEC-1996 |
| | | | | | 609278 3′, mRNA sequence. | | | |
| | | GB_GSS4: AQ710468 | 555 | AQ710468 | HS_5336_A2_B09_T7A RPCI-11 Human Male BAC Library | Homo sapiens | 39,820 | 13-Jul-99 |
| | | | | | Homo sapiens genomic clone Plate = 912 Col = 18 Row = C, | | | |
| | | | | | genomic survey sequence. | | | |
| | | GB_EST37: AI986900 | 380 | AI986900 | rs19a09.y1 Sommer Pristionchus Pristionchus pacificus cDNA clone IMAGE: | Pristionchus pacificus | 42,105 | 1-Sep-99 |
| | | | | | 5′ similar to WP: C06A1.1 CE02114 TRANSITIONAL | | | |
| | | | | | ENDOPLASMIC RETICULUM ATPASE HOMOLOG 1;, mRNA sequence. | | | |
| rxa02367 | 732 | GB_BA2: SCF76 | 18292 | AL121600 | Streptomyces coelicolor cosmid F76. | Streptomyces coelicolor | 40,195 | 29-Sep-99 |
| | | | | | | A3(2) | | |
| | | GB_SY: SCU53587 | 4546 | U53587 | Artificial Corynebacterium glutamicum IS1207-derived transposon transposase genes, | synthetic construct | 36,755 | 06-MAY-1996 |
| | | | | | complete cds, and 3′5″-aminoglycoside phosphotransferase (aphA-3) | | | |
| | | | | | gene, complete cds. | | | |
| | | GB_PAT: E16763 | 2517 | E16763 | gDNA encoding aspartate transferase (AAT). | Corynebacterium | 38,687 | 28-Jul-99 |
| | | | | | | glutamicum | | |
| rxa02368 | | | | | | | | |
| rxa02374 | 744 | GB_PL2: AC010924 | 80442 | AC010924 | Arabidopsis thaliana chromosome 1 BAC T24D18 sequence, complete sequence. | Arabidopsis thaliana | 39,261 | 6-Nov-99 |
| | | GB_VI: HE1CG | 152261 | X14112 | Herpes simplex virus (HSV) type 1 complete genome. | human herpesvirus 1 | 39,856 | 17-Apr-97 |
| | | GB_VI: HS1ULR | 108360 | D10879 | Herpes simplex virus type 1 long unique region UL. | human herpesvirus 1 | 39,856 | 3-Feb-99 |
| rxa02381 | 1146 | GB_BA1: CGPROAGEN | 1783 | X82929 | C. glutamicum proA gene. | Corynebacterium | 98,974 | 23-Jan-97 |
| | | | | | | glutamicum | | |
| | | GB_BA1: CGPROAGEN | 1783 | X82929 | C. glutamicum proA gene. | Corynebacterium | 37,156 | 23-Jan-97 |
| | | | | | | glutamicum | | |
| | | GB_GSS10: AQ215523 | 445 | AQ215523 | HS_2259_B2_F03_MR CIT Approved Human Genomic Sperm Library D | Homo sapiens | 40,674 | 19-Sep-98 |
| | | | | | Homo sapiens genomic clone Plate = 2259 Col = 6 Row = L, | | | |
| | | | | | genomic survey sequence. | | | |
| rxa02383 | 736 | GB_EST35: AI810729 | 450 | AI810729 | tt86h09.x1 NCI_CGAP_Pr28 Homo sapiens cDNA clone IMAGE: 2248481 3′, | Homo sapiens | 41,568 | 7-Jul-99 |
| | | | | | mRNA sequence. | | | |
| | | GB_EST22: AI048725 | 347 | AI048725 | ub31d01.r1 Soares 2NbMT Mus musculus cDNA clone IMAGE: 1379329 5′, | Mus musculus | 39,412 | 8-Jul-98 |
| | | | | | mRNA sequence. | | | |
| | | GB_EST15: AA466288 | 431 | AA466288 | vh34c01.r1 Barstead mouse pooled organs MPLRB4 Mus musculus | Mus musculus | 39,336 | 11-Jun-97 |
| | | | | | cDNA clone IMAGE: 888864 5′, mRNA sequence. | | | |
| rxa02387 | 885 | GB_PR3: AC004687 | 175120 | AC004687 | Homo sapiens chromosome 17, clone hRPC.1171_I_10, complete sequence. | Homo sapiens | 34,518 | 26-Jun-98 |
| | | GB_PR3: AC004687 | 175120 | AC004687 | Homo sapiens chromosome 17, clone hRPC.1171_I_10, complete sequence. | Homo sapiens | 38,551 | 26-Jun-98 |
| | | GB_GSS15: AQ604975 | 536 | AQ604975 | HS_2135_B2_G04_T7C CIT Approved Human Genomic Sperm Library D | Homo sapiens | 39,321 | 10-Jun-99 |
| | | | | | Homo sapiens genomic clone Plate = 2135 Col = 8 Row = N, | | | |
| | | | | | genomic survey sequence. | | | |
| rxa02390 | 792 | GB_BA2: SC51A | 42527 | AL121596 | Streptomyces coelicolor cosmid 51A. | Streptomyces coelicolor | 38,804 | 28-Sep-99 |
| | | | | | | A3(2) | | |
| | | GB_BA2: AF073776 | 5138 | AF073776 | Pseudomonas aeruginosa MexZ (mexZ), complete cds; and mexGH operon, | Pseudomonas aeruginosa | 37,245 | 19-OCT-1998 |
| | | | | | complete sequence. | | | |
| | | GB_BA1: AB015853 | 5461 | AB015853 | Pseudomonas aeruginosa gene for MexX and MexY, complete cds. | Pseudomonas aeruginosa | 40,641 | 13-Nov-98 |
| rxa02393 | 405 | GB_BA1: RCU57682 | 86896 | U57682 | Rhodobacter capsulatus cosmids 143-147, complete sequence. | Rhodobacter capsulatus | 44,246 | 7-Feb-97 |
| | | GB_PL2: T2K10 | 88037 | AC005966 | Arabidopsis thaliana chromosome 1 BAC T2K10 sequence, complete sequence. | Arabidopsis thaliana | 42,455 | 10-Feb-99 |
| | | GB_PL2: T24H24 | 88848 | AF075598 | Arabidopsis thaliana BAC T24H24. | Arabidopsis thaliana | 34,826 | 3-Aug-98 |
| rxa02395 | 2013 | GB_BA1: SC5F2A | 40105 | AL049587 | Streptomyces coelicolor cosmid 5F2A. | Streptomyces coelicolor | 51,688 | 24-MAY-1999 |
| | | GB_BA1: CGBETPGEN | 2339 | X93514 | C. glutamicum betP gene. | Corynebacterium | 48,877 | 8-Sep-97 |
| | | | | | | glutamicum | | |
| | | GB_PL2: AF015436 | 682 | AF015436 | Liquidambar formosana internal transcribed spacer 1, 5.8S ribosomal RNA gene; | Liquidambar formosana | 36,217 | 1-Feb-99 |
| | | | | | and internal transcribed spacer 2, complete sequence. | | | |
| rxa02396 | 402 | GB_BA2: AE000070 | 9973 | AE000070 | Rhizobium sp. NGR234 plasmid pNGR234a, section 7 of 46 of the complete | Rhizobium sp. NGR234 | 35,572 | 12-DEC-1997 |
| | | | | | plasmid sequence. | | | |
| | | GB_BA2: AE000070 | 9973 | AE000070 | Rhizobium sp. NGR234 plasmid pNGR234a, section 7 of 46 of the complete | Rhizobium sp. NGR234 | 37,436 | 12-DEC-1997 |
| | | | | | plasmid sequence. | | | |
| | | GB_BA1: CVAJ677 | 1087 | AJ000677 | Chromatium vinosum recA gene. | Allochromatium vinosum | 37,500 | 8-Aug-97 |
| rxa02398 | 1725 | GB_PR1: HUMJUNA | 3622 | J04111 | Human c-jun proto oncogene (JUN), complete cds, clone hCJ-1. | Homo sapiens | 37,806 | 6-Jan-95 |
| | | GB_EST35: AL041724 | 462 | AL041724 | DKFZp434O0317_r1 434 (synonym: htes3) Homo sapiens cDNA | Homo sapiens | 40,260 | 29-Sep-99 |
| | | | | | clone DKFZp434O0317 5′, mRNA sequence. | | | |
| | | GB_PAT: I96176 | 3622 | I96176 | Sequence 13 from patent U.S. Pat. No. 5734039. | Unknown. | 37,806 | 01-DEC-1998 |
| rxa02403 | 888 | GB_BA1: CGACEB | 3024 | X78491 | C. glutamicum (ATCC 13032) aceB gene. | Corynebacterium | 47,410 | 13-Jan-95 |
| | | | | | | glutamicum | | |
| | | GB_BA1: CORACEB | 2725 | L27123 | Corynebacterium glutamicum malate synthase (aceB) gene, complete cds. | Corynebacterium | 43,981 | 8-Jun-95 |
| | | | | | | glutamicum | | |
| | | GB_IN1: CEK06A4 | 34006 | Z70755 | Caenorhabditis elegans cosmid K06A4, complete sequence. | Caenorhabditis elegans | 37,875 | 23-Nov-98 |
| rxa02406 | 672 | GB_EST22: AI062160 | 629 | AI062160 | GH01261.5prime GH Drosophila melanogaster head pOT2 Drosophila melanogaster | Drosophila melanogaster | 37,687 | 24-Nov-98 |
| | | | | | cDNA clone GH01261 5prime, mRNA sequence. | | | |
| | | GB_PR1: HSRPIILS | 6732 | X63564 | H. sapiens mRNA for RNA polymerase II largest subunit. | Homo sapiens | 36,486 | 13-Feb-92 |
| | | GB_PR1: HSRPIILS | 6732 | X63564 | H. sapiens mRNA for RNA polymerase II largest subunit. | Homo sapiens | 38,813 | 13-Feb-92 |
| rxa02407 | 495 | GB_BA1: MTCY130 | 32514 | Z73902 | Mycobacterium tuberculosis H37Rv complete genome; segment 59/162. | Mycobacterium | 54,321 | 17-Jun-98 |
| | | | | | | tuberculosis | | |
| | | GB_BA1: MSGY151 | 37036 | AD000018 | Mycobacterium tuberculosis sequence from clone y151. | Mycobacterium | 40,000 | 10-DEC-1996 |
| | | | | | | tuberculosis | | |
| | | GB_EST19: AA391133 | 474 | AA391133 | LD10081.5prime LD Drosophila melanogaster embryo BlueScript Drosophila | Drosophila melanogaster | 38,015 | 27-Nov-98 |
| | | | | | melanogaster cDNA clone LD10081 5prime, mRNA sequence. | | | |
| rxa02408 | 1035 | GB_PAT: I92047 | 551 | I92047 | Sequence 14 from patent U.S. Pat. No. 5726299. | Unknown. | 46,000 | 01-DEC-1998 |
| | | GB_PAT: I78759 | 549 | I78759 | Sequence 15 from patent U.S. Pat. No. 5693781. | Unknown. | 45,438 | 3-Apr-98 |
| | | GB_PAT: I92048 | 549 | I92048 | Sequence 15 from patent U.S. Pat. No. 5726299. | Unknown. | 45,438 | 01-DEC-1998 |
| rxa02409 | 660 | GB_EST19: AA438982 | 672 | AA438982 | LD13390.5prime LD Drosophila melanogaster embryo BlueScript Drosophila | Drosophila melanogaster | 36,130 | 27-Nov-98 |
| | | | | | melanogaster cDNA clone LD13390 5prime, mRNA sequence. | | | |
| | | GB_EST28: AI513795 | 635 | AI513795 | GH26887.5prime GH Drosophila melanogaster head pOT2 Drosophila melanogaster | Drosophila melanogaster | 38,840 | 16-MAR-1999 |
| | | | | | cDNA clone GH26887 5prime, mRNA sequence. | | | |
| | | GB_HTG3: AC009601 | 40300 | AC009601 | Leishmania major chromosome 35 clone L165 strain Friedlin, *** SEQUENCING | Leishmania major | 35,759 | 30-Sep-99 |
| | | | | | IN PROGRESS ***, 2 ordered pieces. | | | |
| rxa02412 | 603 | GB_BA1: AB020624 | 1605 | AB020624 | Corynebacterium glutamicum murl gene for D-glutamate racemase, complete cds. | Corynebacterium | 40,237 | 24-Jul-99 |
| | | | | | | glutamicum | | |
| | | GB_EST19: AA756805 | 646 | AA756805 | vv72b10.r1 Stratagene mouse skin (#937313) Mus musculus cDNA clone IMAGE: | Mus musculus | 34,483 | 21-Jan-98 |
| | | | | | 1227931 5′ similar to gb: D21261 SM22-ALPHA HOMOLOG (HUMAN);, | | | |
| | | | | | mRNA sequence. | | | |
| | | GB_RO: AF149291 | 1388 | AF149291 | Mus musculus transgelin mRNA, complete cds. | Mus musculus | 37,540 | 8-Jun-99 |
| rxa02417 | 2247 | GB_GSS14: AQ554774 | 813 | AQ554774 | RPCI-11-436G15.TV RPCI-11 Homo sapiens genomic clone RPCI-11-436G15, | Homo sapiens | 34,649 | 28-MAY-1999 |
| | | | | | genomic survey sequence. | | | |
| | | GB_GSS4: AQ713076 | 500 | AQ713076 | HS_5384_A2_C05_SP6E RPCI-11 Human Male BAC Library Homo sapiens | Homo sapiens | 35,200 | 13-Jul-99 |
| | | | | | genomic clone Plate = 960 Col = 10 Row = E, | | | |
| | | | | | genomic survey sequence. | | | |
| | | GB_STS: G47161 | 448 | G47161 | Z15758_1 Zebrafish AB Danio rerio STS genomic clone Z15758 5′, | Danio rerio | 39,910 | 23-MAR-1999 |
| | | | | | sequence tagged site. | | | |
| rxa02421 | 933 | GB_HTG2: AC005708 | 76712 | AC005708 | Drosophila melanogaster chromosome 2 clone DS08537 (D425) map 50C1-50C2 | Drosophila melanogaster | 36,207 | 15-Jan-99 |
| | | | | | strain y2; cn bw sp, *** SEQUENCING IN | | | |
| | | | | | PROGRESS ***, 20 unordered pieces. | | | |
| | | GB_HTG3: AC005812 | 76721 | AC005812 | Drosophila melanogaster chromosome 2 clone DS07345 (D445) | Drosophila melanogaster | 36,205 | 20-Sep-99 |
| | | | | | map 50C1-50C2 strain y; cn bw sp, *** SEQUENCING | | | |
| | | | | | IN PROGRESS ***, 8 unordered pieces. | | | |
| | | GB_HTG2: AC005673 | 77023 | AC005673 | Drosophila melanogaster chromosome 2 clone DS00096 (D427) map 50C1-50C4 | Drosophila melanogaster | 39,321 | 30-Jul-99 |
| | | | | | strain y; cn bw sp, *** SEQUENCING IN PROGRESS ***, | | | |
| | | | | | 12 unordered pieces. | | | |
| rxa02425 | 653 | GB_BA1: PFPHCOAHL | 2700 | Y13067 | Pseudomonas fluorescens genes encoding p-hydroxycinnamoyl CoA hydratase/lyase | Pseudomonas fluorescens | 40,854 | 05-MAY-1998 |
| | | | | | and vanillin: NAD+ oxidoreductase. | | | |
| | | GB_EST27: AI438343 | 610 | AI438343 | SWOvAFCAP31F09SK Onchocerca volvulus adult female cDNA | Onchocerca volvulus | 41,244 | 09-MAR-1999 |
| | | | | | (SAW98MLW-OvAF) Onchocerca volvulus cDNA clone SWOvAFCAP31F09 5′, | | | |
| | | | | | mRNA sequence. | | | |
| | | GB_BA1: XANHRPA1A | 1824 | M99173 | Xanthomonas campstris HrpA1 gene, complete cds. | Xanthomonas campestris | 37,520 | 14-Sep-93 |
| rxa02427 | 510 | GB_OV: CCA245635 | 2455 | AJ245635 | Cyprinus carpio IL-1 gene for interleukin-1-beta. | Cyprinus carpio | 35,614 | 5-Aug-99 |
| | | GB_OV: AB010701 | 1213 | AB010701 | Cyprinus carpio mRNA for interleukin-1 beta, complete cds. | Cyprinus carpio | 36,821 | 29-Jan-98 |
| | | GB_OV: CCA245635 | 2455 | AJ245635 | Cyprinus carpio IL-1 gene for interleukin-1-beta. | Cyprinus carpio | 35,060 | 5-Aug-99 |
| rxa02428 | 1257 | GB_IN1: CEY40B1B | 29313 | AL032636 | Caenorhabditis elegans cosmid Y40B1B, complete sequence. | Caenorhabditis elegans | 37,068 | 12-Nov-99 |
| | | GB_GSS12: AQ374513 | 640 | AQ374513 | RPCI11-145N15.TJ RPCI-11 Homo sapiens genomic clone RPCI-11-145N15, | Homo sapiens | 35,636 | 20-MAY-1999 |
| | | | | | genomic survey sequence. | | | |
| | | GB_IN1: CEY40B1B | 29313 | AL032636 | Caenorhabditis elegans cosmid Y40B1B, complete sequence. | Caenorhabditis elegans | 32,800 | 12-Nov-99 |
| rxa02430 | 309 | GB_BA1: MTCY1A11 | 30850 | Z78020 | Mycobacterium tuberculosis H37Rv complete genome; segment 83/162. | Mycobacterium | 64,610 | 17-Jun-98 |
| | | | | | | tuberculosis | | |
| | | GB_PR4: AC004998 | 135572 | AC004998 | Homo sapiens clone DJ164D05, complete sequence. | Homo sapiens | 41,118 | 17-Jun-99 |
| | | GB_PR2: AC002091 | 161799 | AC002091 | Genomic sequence from Human 17, complete sequence. | Homo sapiens | 36,393 | 9-Sep-97 |
| rxa02433 | 723 | GB_HTG5: AC009754 | 212978 | AC009754 | Homo sapiens chromosome 15 clone RP11-519C12, WORKING DRAFT | Homo sapiens | 33,008 | 17-Nov-99 |
| | | | | | SEQUENCE, 16 ordered pieces. | | | |
| | | GB_HTG5: AC009754 | 212978 | AC009754 | Homo sapiens chromosome 15 clone RP11-519C12, WORKING DRAFT | Homo sapiens | 39,716 | 17-Nov-99 |
| | | | | | SEQUENCE, 16 ordered pieces. | | | |
| | | GB_PR4: HUAC003108 | 164564 | AC003108 | Human Chromosome 16 BAC clone CIT987SK-327O24, complete sequence. | Homo sapiens | 35,180 | 23-Nov-99 |
| rxa02437 | 933 | GB_IN2: AC005650 | 60019 | AC005650 | Drosophila melanogaster, chromosome 2R, region 59B4-59B7, P1 clone DS02885, | Drosophila melanogaster | 40,397 | 30-Jan-99 |
| | | | | | complete sequence. | | | |
| | | GB_IN2: AC005650 | 60019 | AC005650 | Drosophila melanogaster, chromosome 2R, region 59B4-59B7, P1 clone DS02885, | Drosophila melanogaster | 37,719 | 30-Jan-99 |
| | | | | | complete sequence. | | | |
| | | GB_RO: AF081193 | 2250 | AF081193 | Mus musculus calcium and DAG-regulated guanine nucleotide exchange | Mus musculus | 37,835 | 28-Nov-98 |
| | | | | | factor I mRNA, complete cds. | | | |
| rxa02443 | 1077 | GB_HTG4: AC009370 | 59409 | AC009370 | Drosophila melanogaster chromosome 3L/75C1 clone RPCI98-35F4, | Drosophila melanogaster | 35,460 | 16-OCT-1999 |
| | | | | | *** SEQUENCING IN PROGRESS ***, 40 unordered pieces. | | | |
| | | GB_HTG4: AC009370 | 59409 | AC009370 | Drosophila melanogaster chromosome 3L/75C1 clone RPCI98-35F4, | Drosophila melanogaster | 35,460 | 16-OCT-1999 |
| | | | | | *** SEQUENCING IN PROGRESS ***, 40 unordered pieces. | | | |
| | | GB_EST9: AA081445 | 311 | AA081445 | zn18a01.r1 Stratagene neuroepithelium NT2RAMI 937234 Homo sapiens cDNA clone | Homo sapiens | 36,334 | 21-OCT-1996 |
| | | | | | IMAGE: 547752 5′, mRNA sequence. | | | |
| rxa02444 | 1401 | GB_BA2: SCF76 | 18292 | AL121600 | Streptomyces coelicolor cosmid F76. | Streptomyces coelicolor | 39,226 | 29-Sep-99 |
| | | | | | | A3(2) | | |
| | | GB_PR2: HS1022J11 | 137658 | AL049765 | Human DNA sequence from clone 1022J11 on chromosome 20q13.13-13.2, | Homo sapiens | 35,444 | 23-Nov-99 |
| | | | | | complete sequence. | | | |
| | | GB_HTG1: AC002345 | 132645 | AC002345 | Homo sapiens chromosome 17 clone 20D5, *** SEQUENCING IN PROGRESS ***, | Homo sapiens | 35,106 | 25-Aug-97 |
| | | | | | 10 unordered pieces. | | | |
| rxa02452 | 303 | GB_GSS14: AQ579499 | 825 | AQ579499 | nbxb0084D17f CUGI Rice BAC Library Oryza sativa genomic clone nbxb0084D17f, | Oryza sativa | 39,535 | 2-Jun-99 |
| | | | | | genomic survey sequence. | | | |
| | | GB_GSS14: AQ579499 | 825 | AQ579499 | nbxb0084D17f CUGI Rice BAC Library Oryza sativa genomic clone nbxb0084D17f, | Oryza sativa | 36,213 | 2-Jun-99 |
| | | | | | genomic survey sequence. | | | |
| rxa02454 | 1365 | GB_HTG3: AC007810 | 140175 | AC007810 | Drosophila melanogaster chromosome 3 clone BACR14A01 (D720) RPCI-98 14.A.1 | Drosophila melanogaster | 33,931 | 17-Sep-99 |
| | | | | | map 90C-90C strain y; cn bw sp, *** SEQUENCING IN PROGRESS ***, | | | |
| | | | | | 89 unordered pieces. | | | |
| | | GB_HTG3: AC007810 | 140175 | AC007810 | Drosophila melanogaster chromosome 3 clone BACR14A01 (D720) RPCI-98 14.A.1 | Drosophila melanogaster | 33,931 | 17-Sep-99 |
| | | | | | map 90C-90C strain y; cn bw sp, *** SEQUENCING IN PROGRESS***, | | | |
| | | | | | 89 unordered pieces. | | | |
| | | GB_PR3: AC005339 | 32360 | AC005339 | Homo sapiens chromosome 19, cosmid R33729, complete sequence. | Homo sapiens | 38,131 | 30-Jul-98 |
| rxa02457 | 1233 | GB_HTG3: AC009346 | 105005 | AC009346 | Drosophila melanogaster chromosome 3 clone BACR03P13 (D672) RPCI-98 03.P.13 | Drosophila melanogaster | 36,829 | 27-Aug-99 |
| | | | | | map 83A-83B strain y; cn bw sp, *** SEQUENCING IN PROGRESS ***, | | | |
| | | | | | 83 unordered pieces. | | | |
| | | GB_EST20: AA820427 | 436 | AA820427 | LD24042.5prime LD Drosophila melanogaster embryo pOT2 Drosophila | Drosophila melanogaster | 38,018 | 25-Feb-99 |
| | | | | | melanogaster cDNA clone LD24042 5prime, mRNA sequence. | | | |
| | | GB_HTG3: AC009346 | 105005 | AC009346 | Drosophila melanogaster chromosome 3 clone BACR03P13 (D672) RPCI-98 03.P.13 | Drosophila melanogaster | 36,829 | 27-Aug-99 |
| | | | | | map 83A-83B strain y; cn bw sp, *** SEQUENCING IN PROGRESS ***, | | | |
| | | | | | 83 unordered pieces. | | | |
| rxa02459 | 858 | GB_BA2: AF114233 | 1852 | AF114233 | Corynebacterium glutamicum 5-enolpyruvylshikimate 3-phosphate synthase (aroA) | Corynebacterium | 99,248 | 7-Feb-99 |
| | | | | | gene, complete cds. | glutamicum | | |
| | | GB_HTG1: CEY45F10_2 | 110000 | Z93245 | Caenorhabditis elegans chromosome IV clone Y45F10, *** SEQUENCING | Caenorhabditis elegans | 35,621 | 17-Sep-97 |
| | | | | | IN PROGRESS ***, in unordered pieces. | | | |
| | | GB_HTG1: CEY45F10_2 | 110000 | Z93245 | Caenorhabditis elegans chromosome IV clone Y45F10, | Caenorhabditis elegans | 35,621 | 17-Sep-97 |
| | | | | | *** SEQUENCING IN PROGRESS ***, in unordered pieces. | | | |
| rxa02460 | | | | | | | | |
| rxa02461 | 531 | GB_EST10: AA153371 | 590 | AA153371 | ms02a12.r1 Stratagene mouse embryonic carcinoma (#937317) | Mus musculus | 39,203 | 11-Feb-97 |
| | | | | | Mus musculus cDNA clone IMAGE: 605758 5′ similar to gb: M24194 | | | |
| | | | | | GUANINE NUCLEOTIDE-BINDING PROTEIN BETA | | | |
| | | | | | SUBUNIT-LIKE PROTEIN (HUMAN); gb: X75313 M. musculus (MOUSE);, | | | |
| | | | | | mRNA sequence. | | | |
| | | GB_EST10: AA153371 | 590 | AA153371 | ms02a12.r1 Stratagene mouse embryonic carcinoma (#937317) | Mus musculus | 41,920 | 11-Feb-97 |
| | | | | | Mus musculus cDNA clone IMAGE: 605758 5′ similar to gb: M24194 | | | |
| | | | | | GUANINE NUCLEOTIDE-BINDING PROTEIN BETA | | | |
| | | | | | SUBUNIT-LIKE PROTEIN (HUMAN); gb: X75313 M. musculus (MOUSE);, | | | |
| | | | | | mRNA sequence. | | | |
| rxa02464 | 1323 | GB_HTG4: AC008754 | 86446 | AC008754 | Homo sapiens chromosome 19 clone CITB-E1_3023J11, *** SEQUENCING | Homo sapiens | 36,064 | 31-OCT-1999 |
| | | | | | IN PROGRESS ***, 73 unordered pieces. | | | |
| | | GB_HTG4: AC008754 | 86446 | AC008754 | Homo sapiens chromosome 19 clone CITB-E1_3023J11, *** SEQUENCING IN | Homo sapiens | 36,064 | 31-OCT-1999 |
| | | | | | PROGRESS ***, 73 unordered pieces. | | | |
| | | GB_HTG4: AC008754 | 86446 | AC008754 | Homo sapiens chromosome 19 clone CITB-E1_3023J11, *** SEQUENCING IN | Homo sapiens | 37,589 | 31-OCT-1999 |
| | | | | | PROGRESS ***, 73 unordered pieces. | | | |
| rxa02465 | 522 | GB_PR3: AC004960 | 143834 | AC004960 | Homo sapiens PAC clone DJ1098B01 from 7q11.23-q21, complete sequence. | Homo sapiens | 35,010 | 5-Nov-98 |
| | | GB_GSS9: AQ122158 | 428 | AQ122158 | HS_3083_A1_E10_MR CIT Approved Human Genomic Sperm Library D | Homo sapiens | 39,720 | 22-Sep-98 |
| | | | | | Homo sapiens genomic clone Plate = 3083 Col = 19 Row = I, | | | |
| | | | | | genomic survey sequence. | | | |
| | | GB_BA2: AF053227 | 840 | AF053227 | Photobacterium leiognathi probable flavin reductase (luxG) gene, complete cds. | Photobacterium leiognathi | 37,572 | 12-Jun-98 |
| rxa02466 | 187 | GB_EST21: AA942401 | 825 | AA942401 | LD26583.5prime LD Drosophila melanogaster embryo pOT2 Drosophila | Drosophila melanogaster | 37,705 | 25-Nov-98 |
| | | | | | melanogaster cDNA clone LD26583 5prime, mRNA sequence. | | | |
| | | GB_GSS12: AQ400564 | 485 | AQ400564 | HS_5064_A1_G09_T7A RPCI-11 Human Male BAC Library Homo sapiens | Homo sapiens | 38,043 | 13-MAR-1999 |
| | | | | | genomic clone Plate = 640 Col = 17 Row = M, | | | |
| | | | | | genomic survey sequence. | | | |
| | | GB_GSS12: AQ400564 | 485 | AQ400564 | HS_5064_A1_G09_T7A RPCI-11 Human Male BAC Library Homo sapiens | Homo sapiens | 37,647 | 13-MAR-1999 |
| | | | | | genomic clone Plate = 640 Col = 17 Row = M, | | | |
| | | | | | genomic survey sequence. | | | |
| rxa02467 | 348 | GB_HTG2: AC005718 | 149592 | AC005718 | Drosophila melanogaster chromosome 2 clone DS02336 (D440) map 60C8-60D2 | Drosophila melanogaster | 40,525 | 30-Jul-99 |
| | | | | | strain y; cn bw sp, *** SEQUENCING IN PROGRESS ***, | | | |
| | | | | | 68 unordered pieces. | | | |
| | | GB_HTG2: AC005718 | 149592 | AC005718 | Drosophila melanogaster chromosome 2 clone DS02336 (D440) map 60C8-60D2 | Drosophila melanogaster | 40,525 | 30-Jul-99 |
| | | | | | strain y; cn bw sp, *** SEQUENCING IN PROGRESS ***, | | | |
| | | | | | 68 unordered pieces. | | | |
| | | GB_PR3: AC004217 | 103319 | AC004217 | Homo sapiens 12q24.1 PAC RPCI3-521E19 (Roswell Park Cancer Institute Human | Homo sapiens | 37,389 | 2-Jun-98 |
| | | | | | PAC library) complete sequence. | | | |
| rxa02472 | 414 | GB_GSS12: AQ413964 | 550 | AQ413964 | RPCI-11-207C17.TV RPCI-11 Homo sapiens genomic clone RPCI-11-207C17, | Homo sapiens | 37,870 | 23-MAR-1999 |
| | | | | | genomic survey sequence. | | | |
| | | GB_IN2: CELR09H3 | 10687 | U58740 | Caenorhabditis elegans cosmid R09H3. | Caenorhabditis elegans | 37,408 | 26-MAY-1999 |
| | | GB_GSS13: AQ488397 | 734 | AQ488397 | RPCI-11-243H14.TV RPCI-11 Homo sapiens genomic clone RPCI-11-243H14, | Homo sapiens | 37,569 | 24-Apr-99 |
| | | | | | genomic survey sequence. | | | |
| rxa02473 | 864 | GB_HTG1: CEY7A5 | 235922 | AL021576 | Caenorhabditis elegans chromosome X clone Y7A5, *** SEQUENCING IN | Caenorhabditis elegans | 38,561 | 19-Aug-99 |
| | | | | | PROGRESS ***, in unordered pieces. | | | |
| | | GB_HTG1: CEY7A5 | 235922 | AL021576 | Caenorhabditis elegans chromosome X clone Y7A5, *** SEQUENCING IN | Caenorhabditis elegans | 38,561 | 19-Aug-99 |
| | | | | | PROGRESS ***, in unordered pieces. | | | |
| | | GB_IN1: CEY7A5A | 68270 | AL034489 | Caenorhabditis elegans cosmid Y7A5A, complete sequence. | Caenorhabditis elegans | 38,081 | 18-DEC-1998 |
| rxa02475 | 1278 | GB_BA1: AB009078 | 2686 | AB009078 | Brevibacterium saccharolyticum gene for L-2.3-butanediol dehydrogenase, | Brevibacterium | 99,217 | 13-Feb-99 |
| | | | | | complete cds. | saccharolyticum | | |
| | | GB_PH: AF074945 | 15644 | AF074945 | Mycoplasma arthritidis bacteriophage MAV1, complete genome. | Mycoplasma arthritidis | 36,876 | 27-Jul-99 |
| | | | | | | bacteriophage MAV1 | | |
| | | GB_BA1: MTV008 | 63033 | AL021246 | Mycobacterium tuberculosis H37Rv complete genome; segment 108/162. | Mycobacterium | 37,520 | 17-Jun-98 |
| | | | | | | tuberculosis | | |
| rxa02478 | 1338 | GB_HTG1: AC002419 | 128340 | AC002419 | Homo sapiens chromosome X clone bWXD40, *** SEQUENCING IN | Homo sapiens | 34,700 | 12-Aug-97 |
| | | | | | PROGRESS ***, 2 unordered pieces. | | | |
| | | GB_PR3: AC004073 | 79612 | AC004073 | Human Chromosome X, complete sequence. | Homo sapiens | 34,700 | 29-Jan-98 |
| | | GB_HTG1: AC002419 | 128340 | AC002419 | Homo sapiens chromosome X clone bWXD40, *** SEQUENCING IN | Homo sapiens | 34,700 | 12-Aug-97 |
| | | | | | PROGRESS ***, 2 unordered pieces. | | | |
| rxa02482 | 933 | GB_OV: AF077329 | 1645 | AF077329 | Coturnix coturnix pro-alpha2(I) collagen mRNA, partial cds. | Coturnix coturnix | 40,202 | 3-Feb-99 |
| | | GB_PL2: SFU59150 | 2854 | U59150 | Sartorya fumigata nucleolar protein AfCbf5p (AfCBF5p) mRNA, complete cds. | Aspergillus fumigatus | 36,789 | 1-Jan-98 |
| | | GB_BA2: AE000106 | 12554 | AE000106 | Rhizobium sp. NGR234 plasmid pNGR234a, section 43 of 46 of the complete | Rhizobium sp. NGR234 | 36,630 | 12-DEC-1997 |
| | | | | | plasmid sequence. | | | |
| rxa02483 | 936 | GB_HTG1: AC002345 | 132645 | AC002345 | Homo sapiens chromosome 17 clone 20D5, *** SEQUENCING IN | Homo sapiens | 37,942 | 25-Aug-97 |
| | | | | | PROGRESS***, 10 unordered pieces. | | | |
| | | GB_HTG1: AC002345 | 132645 | AC002345 | Homo sapiens chromosome 17 clone 20D5, *** SEQUENCING IN | Homo sapiens | 37,942 | 25-Aug-97 |
| | | | | | PROGRESS ***, 10 unordered pieces. | | | |
| | | GB_PR4: AF118569 | 24070 | AF118569 | Homo sapiens angiotensin I converting enzyme precursor (DCP1) gene, | Homo sapiens | 37,352 | 28-OCT-1999 |
| | | | | | alternative splice products, complete cds. | | | |
| rxa02484 | 624 | GB_BA1: RLSPRLVCP | 3696 | Y09534 | R. leguminosarum Symbiosis Plasmid DNA, rlvCP gene. | Rhizobium leguminosarum | 38,003 | 26-Feb-97 |
| | | GB_BA2: RLU23040 | 3931 | U23040 | Rhizobium leguminosarum bv. viciae putative glycerol-3-phosphate transport | Rhizobium leguminosarum | 38,003 | 26-Aug-96 |
| | | | | | protein (ugpC) gene, partial cds, and chemoreceptor protein (mcpA), putative | bv. viciae | | |
| | | | | | 2-hydroxychromene-2-carboxylate isomerase, and putative alcohol | | | |
| | | | | | dehydrogenase genes, complete cds. | | | |
| | | GB_BA1: NGORBKGME | 1580 | L07845 | Neisseria gonorrhoeae ribokinase (rbk) gene, 3′ end; | Neisseria gonorrhoeae | 46,939 | 11-OCT-1995 |
| | | | | | ADP-L-glycero-D-mannoheptose epimerase (gme) gene, | | | |
| | | | | | complete cds. | | | |
| rxa02486 | 759 | GB_IN1: CELM02D8 | 40876 | U41034 | Caenorhabditis elegans cosmid M02D8. | Caenorhabditis elegans | 38,358 | 30-Nov-95 |
| | | GB_IN2: CELC36C5 | 41596 | AF016444 | Caenorhabditis elegans cosmid C36C5. | Caenorhabditis elegans | 38,482 | 08-OCT-1999 |
| | | GB_HTG3: AC011467 | 188118 | AC011467 | Homo sapiens chromosome 19 clone CIT-HSPC_457E21, *** SEQUENCING IN | Homo sapiens | 37,954 | 07-OCT-1999 |
| | | | | | PROGRESS ***, 59 unordered pieces. | | | |
| rxa02488 | 392 | GB_HTG2: AC006765 | 274498 | AC006765 | Caenorhabditis elegans clone Y43H11, *** SEQUENCING IN | Caenorhabditis elegans | 38,961 | 23-Feb-99 |
| | | | | | PROGRESS ***, 7 unordered pieces. | | | |
| | | GB_HTG2: AC006765 | 274498 | AC006765 | Caenorhabditis elegans clone Y43H11, *** SEQUENCING IN | Caenorhabditis elegans | 38,961 | 23-Feb-99 |
| | | | | | PROGRESS ***, 7 unordered pieces. | | | |
| | | GB_HTG4: AC010035 | 173152 | AC010035 | Drosophila melanogaster chromosome 3L/74B2 clone RPCO98-6H1, | Drosophila melanogaster | 38,010 | 16-OCT-1999 |
| | | | | | *** SEQUENCING IN PROGRESS ***, 60 unordered pieces. | | | |
| rxa02489 | 724 | GB_GSS8: AQ050210 | 796 | AQ050210 | nbxb0003cD08r CUGI Rice BAC Library Oryza sativa genomic clone | Oryza sativa | 40,201 | 24-MAR-1999 |
| | | | | | nbxb0003H15r, genomic survey sequence. | | | |
| | | GB_PL1: D87819 | 2036 | D87819 | Oryza sativa mRNA for sucrose transporter, complete cds. | Oryza sativa | 39,356 | 26-DEC-1997 |
| | | GB_STS: G53565 | 627 | G53565 | SHGC-83995 Human Homo sapiens STS genomic, sequence tagged site. | Homo sapiens | 40,237 | 25-Jun-99 |
| rxa02495 | 2691 | GB_BA1: MTCY19H9 | 20679 | Z83857 | Mycobacterium tuberculosis H37Rv complete genome; segment 129/162. | Mycobacterium | 40,853 | 18-Jun-98 |
| | | | | | | tuberculosis | | |
| | | GB_BA1: MTCY19H9 | 20679 | Z83857 | Mycobacterium tuberculosis H37Rv complete genome; segment 129/162. | Mycobacterium | 40,358 | 18-Jun-98 |
| | | | | | | tuberculosis | | |
| | | GB_HTG1: HSDJ901O8 | 114599 | AL078461 | Homo sapiens chromosome 20 clone RP5-901O8 map q11.1-11.23, | Homo sapiens | 34,059 | 25-Nov-99 |
| | | | | | *** SEQUENCING IN PROGRESS ***, in unordered pieces. | | | |
| rxa02496 | 930 | GB_EST36: AV201062 | 373 | AV201062 | AV201062 Yuji Kohara unpublished cDNA Caenorhabditis elegans cDNA clone | Caenorhabditis elegans | 41,287 | 26-Jul-99 |
| | | | | | yk250f11 5′, mRNA sequence. | | | |
| | | GB_IN1: CELC10F3 | 40172 | AF022968 | Caenorhabditis elegans cosmid C10F3. | Caenorhabditis elegans | 35,217 | 10-Sep-97 |
| | | GB_EST29: AI612578 | 357 | AI612578 | TENG0372 T. Cruzi epimastigote normalised cDNA Library Trypanosoma cruzi | Trypanosoma cruzi | 39,474 | 7-Jul-99 |
| | | | | | cDNA clone n715.r 5′, mRNA sequence. | | | |
| rxa02498 | 927 | GB_BA2: CGU31225 | 1817 | U31225 | Corynebacterium glutamicum L-proline: NADP+ 5-oxidoreductase | Corynebacterium | 92,580 | 2-Aug-96 |
| | | | | | (proC) gene, complete cds. | glutamicum | | |
| | | GB_PR2: AP000197 | 100000 | AP000197 | Homo sapiens genomic DNA, chromosome 21q22.1, D21S226-AML region, | Homo sapiens | 36,344 | 20-Nov-99 |
| | | | | | clone B355D16-T1073, segment 3/8, complete sequence. | | | |
| | | GB_PR2: AP000093 | 100000 | AP000093 | Homo sapiens genomic DNA of 21q22.1, GART and AML related, | Homo sapiens | 36,344 | 25-Sep-99 |
| | | | | | B335D16-P10G11 region, segment 3/7, complete sequence. | | | |
| rxa02500 | 222 | GB_BA1: MTCY20G9 | 37218 | Z77162 | Mycobacterium tuberculosis H37Rv complete genome; segment 25/162. | Mycobacterium | 58,257 | 17-Jun-98 |
| | | | | | | tuberculosis | | |
| | | GB_BA1: U00018 | 42991 | U00018 | Mycobacterium leprae cosmid B2168. | Mycobacterium leprae | 44,776 | 01-MAR-1994 |
| | | GB_BA1: SCE68 | 38084 | AL079345 | Streptomyces coelicolor cosmid E68. | Streptomyces coelicolor | 37,624 | 16-Jul-99 |
| | | | | | | A3(2) | | |
| rxa02505 | 294 | GB_RO: MM2B4J | 289 | X00621 | Mouse hybridoma 2B4 gene fragment (J-region) for T-cell receptor. | Mus musculus | 36,364 | 10-Nov-95 |
| | | GB_RO: MUSTCBJB1 | 2276 | K02802 | Mouse T-cell receptor germline beta-chain J-beta-2 gene cluster, including J-beta- | Mus musculus | 32,862 | 27-Apr-93 |
| | | | | | [2.1, 2.2, 2.3, 2.4, 2.5, 2.psi, 2.6] genes. | | | |
| | | GB_RO: MMAE000665 | 199101 | AE000665 | Mus musculus TCR beta locus from bases 501860 to 700960 (section 3 of | Mus musculus | 36,879 | 4-Sep-97 |
| | | | | | 3) of the complete sequence. | | | |
| rxa02506 | | | | | | | | |
| rxa02510 | 759 | GB_OM: PIGMTNADP | 1585 | M86719 | Pig mitochondrial NADP-isocitrate dehydrogenase mRNA, 3′ end. | Sus scrofa | 36,963 | 12-Jun-93 |
| | | GB_EST17: AA629042 | 359 | AA629042 | zu77d08.s1 Soares_testis_NHT Homo sapiens cDNA clone IMAGE: 744015 3′, | Homo sapiens | 37,184 | 16-OCT-1997 |
| | | | | | mRNA sequence. | | | |
| | | GB_EST20: AA837524 | 528 | AA837524 | oe31d07.s1 NCI_CGAP_Pr25 Homo sapiens cDNA clone IMAGE: 1410157 | Homo sapiens | 40,039 | 26-Feb-98 |
| | | | | | similar to gb: X69391 60S RIBOSOMAL PROTEIN L6 | | | |
| | | | | | (HUMAN);, mRNA sequence. | | | |
| rxa02514 | 857 | GB_PR2: CNS01DS9 | 175148 | AL121694 | Human chromosome 14 DNA sequence *** IN PROGRESS *** BAC | Homo sapiens | 35,185 | 8-Nov-99 |
| | | | | | R-701B16 of RPCI-11 library from chromosome 14 of Homo sapiens (Human), | | | |
| | | | | | complete sequence. | | | |
| | | GB_PR4: AC006222 | 165643 | AC006222 | Homo sapiens, clone hRPK.12_A_1, complete sequence. | Homo sapiens | 33,411 | 15-Jan-99 |
| | | GB_PR4: AC006222 | 165643 | AC006222 | Homo sapiens, clone hRPK.12_A_1, complete sequence. | Homo sapiens | 35,629 | 15-Jan-99 |
| rxa02518 | 534 | GB_BA1: MTV007 | 32806 | AL021184 | Mycobacterium tuberculosis H37Rv complete genome; segment 64/162. | Mycobacterium | 57,965 | 17-Jun-98 |
| | | | | | | tuberculosis | | |
| | | GB_EST16: AA576027 | 231 | AA576027 | nm57e05.s1 NCI_CGAP_Br3 Homo sapiens cDNA clone IMAGE: 1072352 | Homo sapiens | 47,674 | 9-Sep-97 |
| | | | | | 3′ similar to TR: G1001455 G1001455 HYPOTHETICAL 141.7 | | | |
| | | | | | KD PROTEIN.;, mRNA sequence. | | | |
| | | GB_BA2: AE000226 | 10466 | AE000226 | Escherichia coli K-12 MG1655 section 116 of 400 of the complete genome. | Escherichia coli | 38,447 | 12-Nov-98 |
| rxa02519 | 1752 | GB_IN2: DMNRG2 | 8574 | AF050085 | Drosophila melanogaster neuroglian (nrg) gene, exons 3-6, 7a, 7b and | Drosophila melanogaster | 38,498 | 5-Aug-98 |
| | | | | | alternatively spliced products, complete cds. | | | |
| | | GB_IN2: AC004322 | 32480 | AC004322 | Drosophila melanogaster DNA sequence (P1 DS01962 (D216)), complete sequence. | Drosophila melanogaster | 36,126 | 29-Aug-98 |
| | | GB_HTG2: AC008188 | 129128 | AC008188 | Drosophila melanogaster chromosome 2 clone BACR08I18 (D660) RPCI-98 | Drosophila melanogaster | 35,660 | 2-Aug-99 |
| | | | | | 08.I.18 map 56A2-56B1 strain y; cn bw sp, *** SEQUENCING IN PROGRESS ***, | | | |
| | | | | | 72 unordered pieces. | | | |
| rxa02520 | 807 | GB_GSS3: B68449 | 228 | B68449 | CIT-HSP-2025P8.TF CIT-HSP Homo sapiens genomic clone 2025P8, | Homo sapiens | 42,544 | 21-Jun-98 |
| | | | | | genomic survey sequence. | | | |
| | | GB_HTG3: AC010642 | 45982 | AC010642 | Homo sapiens chromosome 19 clone LLNL-R_245B6, *** SEQUENCING IN | Homo sapiens | 34,543 | 16-Sep-99 |
| | | | | | PROGRESS ***, 26 unordered pieces. | | | |
| | | GB_HTG3: AC010642 | 45982 | AC010642 | Homo sapiens chromosome 19 clone LLNL-R_245B6, *** SEQUENCING IN | Homo sapiens | 34,543 | 16-Sep-99 |
| | | | | | PROGRESS ***, 26 unordered pieces. | | | |
| rxa02521 | 1566 | GB_BA1: SCC22 | 22115 | AL096839 | Streptomyces coelicolor cosmid C22. | Streptomyces coelicolor | 40,885 | 12-Jul-99 |
| | | GB_BA1: BSUB0017 | 217420 | Z99120 | Bacillus subtilis complete genome (section 17 of 21): from 3197001 to 3414420. | Bacillus subtilis | 38,441 | 26-Nov-97 |
| | | GB_BA1: MLCL536 | 36224 | Z99125 | Mycobacterium leprae cosmid L536. | Mycobacterium leprae | 37,233 | 04-DEC-1998 |
| rxa02524 | 813 | GB_IN1: CELF42H10 | 28687 | L08403 | C. elegans cosmid F42H10. | Caenorhabditis elegans | 32,878 | 22-OCT-1993 |
| | | GB_IN1: CEU02289 | 4824 | U02289 | Caenorhabditis elegans Bristol N2 GTPase-activating protein | Caenorhabditis elegans | 34,457 | 11-Jun-94 |
| | | | | | (CEGAP) mRNA, partial cds. | | | |
| | | GB_IN1: CELF42H10 | 28687 | L08403 | C. elegans cosmid F42H10. | Caenorhabditis elegans | 34,243 | 22-OCT-1993 |
| rxa02525 | 501 | GB_EST36: AU076280 | 416 | AU076280 | AU076280 Rice green shoot Oryza sativa cDNA clone S10896_11A, | Oryza sativa | 42,671 | 27-Jul-99 |
| | | | | | mRNA sequence. | | | |
| | | GB_EST1: D34202 | 355 | D34202 | CELK042E5R Yuji Kohara unpublished cDNA Caenorhabditis elegans cDNA | Caenorhabditis elegans | 42,553 | 8-Aug-94 |
| | | | | | clone yk42e5 3′, mRNA sequence. | | | |
| | | GB_EST1: D34202 | 355 | D34202 | CELK042E5R Yuji Kohara unpublished cDNA Caenorhabditis elegans cDNA | Caenorhabditis elegans | 37,892 | 8-Aug-94 |
| | | | | | clone yk42e5 3′, mRNA sequence. | | | |
| rxa02534 | 927 | GB_EST15: AA490533 | 426 | AA490533 | aa51h04.r1 NCI_CGAP_GCB1 Homo sapiens cDNA clone IMAGE: | Homo sapiens | 41,176 | 15-Aug-97 |
| | | | | | 824503 5′, mRNA sequence. | | | |
| | | GB_PL2: ATFCA3 | 200252 | Z97338 | Arabidopsis thaliana DNA chromosome 4, ESSA I FCA contig fragment No. 3. | Arabidopsis thaliana | 35,568 | 27-Aug-99 |
| | | GB_PL2: ATFCA3 | 200252 | Z97338 | Arabidopsis thaliana DNA chromosome 4, ESSA I FCA contig fragment No. 3. | Arabidopsis thaliana | 37,376 | 27-Aug-99 |
| rxa02537 | 585 | GB_HTG4: AC009732 | 165576 | AC009732 | Drosophila melanogaster chromosome 2 clone BACR05E17 (D1059) | Drosophila melanogaster | 30,727 | 26-OCT-1999 |
| | | | | | RPCI-98 05.E.17 map 57F-57F strain y; cn bw sp, *** SEQUENCING IN | | | |
| | | | | | PROGRESS ***, 83 unordered pieces. | | | |
| | | GB_HTG4: AC009732 | 165576 | AC009732 | Drosophila melanogaster chromosome 2 clone BACR05E17 (D1059) | Drosophila melanogaster | 30,727 | 26-OCT-1999 |
| | | | | | RPCI-98 05.E.17 map 57F-57F strain y; cn bw sp, *** SEQUENCING IN | | | |
| | | | | | PROGRESS ***, 83 unordered pieces. | | | |
| | | GB_HTG4: AC009732 | 165576 | AC009732 | Drosophila melanogaster chromosome 2 clone BACR05E17 (D1059) | Drosophila melanogaster | 36,460 | 26-OCT-1999 |
| | | | | | RPCI-98 05.E.17 map 57F-57F strain y; cn bw sp, *** SEQUENCING IN | | | |
| | | | | | PROGRESS ***, 83 unordered pieces. | | | |
| rxa02538 | 795 | GB_GSS15: AQ606090 | 658 | AQ606090 | HS_5392_A1_E12_T7A RPCI-11 Human Male BAC Library Homo sapiens | Homo sapiens | 39,369 | 10-Jun-99 |
| | | | | | genomic clone Plate = 968 Col = 23 Row = I, | | | |
| | | | | | genomic survey sequence. | | | |
| | | GB_BA1: AXACE | 5323 | X94981 | A. xylinum aceB, aceC, aceD, and aceE genes. | Acetobacter xylinus | 37,009 | 12-Feb-97 |
| | | GB_BA1: AXACE | 5323 | X94981 | A. xylinum aceB, aceC, aceD, and aceE genes. | Acetobacter xylinus | 37,879 | 12-Feb-97 |
| rxa02540 | 561 | GB_BA1: MTY13E10 | 35019 | Z95324 | Mycobacterium tuberculosis H37Rv complete genome; segment 18/162. | Mycobacterium | 51,002 | 17-Jun-98 |
| | | | | | | tuberculosis | | |
| | | GB_BA1: MTDNAGRP | 4644 | X58406 | M. tuberculosis dnaK, grpE, and dnaJ genes. | Mycobacterium | 51,002 | 21-OCT-1992 |
| | | | | | | tuberculosis | | |
| | | GB_BA1: AB007847 | 2400 | AB007847 | Rhodococcus rhodochrous gene for 3-ketosteroid-delta1-dehydrogenase, complete cds. | Rhodococcus rhodochrous | 53,723 | 13-Feb-99 |
| rxa02544 | 1521 | GB_PAT: E14041 | 2776 | E14041 | gDNA encoding laminaripentaose forming enzyme (LPHase). | Streptomyces sp. | 47,351 | 28-Jul-99 |
| | | GB_HTG3: AC010592 | 45971 | AC010592 | Homo sapiens chromosome 5 clone CIT-HSPC_459H20, *** SEQUENCING IN | Homo sapiens | 37,689 | 16-Sep-99 |
| | | | | | PROGRESS ***, 38 unordered pieces. | | | |
| | | GB_HTG3: AC010592 | 45971 | AC010592 | Homo sapiens chromosome 5 clone CIT-HSPC_459H20, *** SEQUENCING IN | Homo sapiens | 37,689 | 16-Sep-99 |
| | | | | | PROGRESS ***, 38 unordered pieces. | | | |
| rxa02545 | 681 | GB_HTG3: AC009016 | 128095 | AC009016 | Homo sapiens chromosome 5 clone P1_889E7, *** SEQUENCING IN | Homo sapiens | 34,763 | 3-Aug-99 |
| | | | | | PROGRESS ***, 67 unordered pieces. | | | |
| | | GB_HTG3: AC009016 | 128095 | AC009016 | Homo sapiens chromosome 5 clone P1_889E7, *** SEQUENCING IN | Homo sapiens | 34,763 | 3-Aug-99 |
| | | | | | PROGRESS ***, 67 unordered pieces. | | | |
| | | GB_HTG3: AC009010 | 72817 | AC009010 | Homo sapiens chromosome 5 clone P1_1352A1, *** SEQUENCING IN | Homo sapiens | 34,763 | 3-Aug-99 |
| | | | | | PROGRESS ***, 19 unordered pieces. | | | |
| rxa02546 | 1227 | GB_HTG3: AC006519 | 134365 | AC006519 | Homo sapiens clone RPCI5-951N9, *** SEQUENCING IN | Homo sapiens | 32,868 | 16-Sep-99 |
| | | | | | PROGRESS ***, 41 unordered pieces. | | | |
| | | GB_BA1: D90738 | 17528 | D90738 | Escherichia coli genomic DNA. (23.0-23.4 min). | Escherichia coli | 38,674 | 7-Feb-99 |
| | | GB_HTG3: AC006519 | 134365 | AC006519 | Homo sapiens clone RPCI5-951N9, *** SEQUENCING IN | Homo sapiens | 32,868 | 16-Sep-99 |
| | | | | | PROGRESS ***, 41 unordered pieces. | | | |
| rxa02549 | 2826 | GB_BA1: CGBPHI16 | 962 | Y12472 | C. glutamicum DNA, attachment site bacteriophage Phi-16. | Corynebacterium | 41,702 | 05-MAR-1999 |
| | | | | | | glutamicum | | |
| | | GB_BA2: AE001095 | 10592 | AE001095 | Archaeoglobus fulgidus section 12 of 172 of the complete genome. | Archaeoglobus fulgidus | 36,817 | 15-DEC-1997 |
| | | GB_EST20: AA887411 | 587 | AA887411 | oj37d06.s1 NCI_CGAP_Lu5 Homo sapiens cDNA clone IMAGE: | Homo sapiens | 41,738 | 9-Jun-98 |
| | | | | | 1500491 3′ similar to gb: X69908_rna1 ATP SYNTHASE | | | |
| | | | | | LIPID-BINDING PROTEIN P2 PRECURSOR (HUMAN);, mRNA | | | |
| | | | | | sequence. | | | |
| rxa02552 | 918 | GB_GSS9: AQ129371 | 377 | AQ129371 | HS_3045_A2_B07_MR CIT Approved Human Genomic Sperm Library D | Homo sapiens | 42,857 | 23-Sep-98 |
| | | | | | Homo sapiens genomic clone Plate = 3045 Col = 14 Row = C, | | | |
| | | | | | genomic survey sequence. | | | |
| | | GB_GSS14: AQ566979 | 600 | AQ566979 | HS_2105_A2_D12_MR CIT Approved Human Genomic Sperm Library D | Homo sapiens | 35,443 | 29-MAY-1999 |
| | | | | | Homo sapiens genomic clone Plate = 2105 Col = 24 Row = G, | | | |
| | | | | | genomic survey sequence. | | | |
| | | GB_IN1: MEPAP | 4636 | X54422 | M. edulis gene for polyphenolic adhesive protein. | Mytilus edulis | 35,619 | 27-MAY-1992 |
| rxa02554 | 747 | GB_PR4: AC004882 | 171878 | AC004882 | Homo sapiens PAC clone DJ076B20 from 22, complete sequence. | Homo sapiens | 37,346 | 22-OCT-1999 |
| | | GB_PR4: AC004882 | 171878 | AC004882 | Homo sapiens PAC clone DJ076B20 from 22, complete sequence. | Homo sapiens | 38,440 | 22-OCT-1999 |
| | | GB_BA2: U32830 | 16388 | U32830 | Haemophilus influenzae Rd section 145 of 163 of the complete genome. | Haemophilus influenzae Rd | 33,514 | 29-MAY-1998 |
| rxa02555 | 726 | GB_GSS1: FR0020618 | 466 | AL013501 | F. rubripes GSS sequence, clone 042H13bD8, genomic survey sequence. | Fugu rubripes | 40,215 | 10-DEC-1997 |
| | | GB_GSS1: FR0020576 | 555 | AL013459 | F. rubripes GSS sequence, clone 042H13aE5, genomic survey sequence. | Fugu rubripes | 35,379 | 10-DEC-1997 |
| | | GB_GSS1: FR0020585 | 431 | AL013468 | F. rubripes GSS sequence, clone 042H13aH5, genomic survey sequence. | Fugu rubripes | 39,718 | 10-DEC-1997 |
| rxa02564 | 1125 | GB_PR3: AC004976 | 127425 | AC004976 | Homo sapiens PAC clone DJ1143H19 from 7p14-p15, complete sequence. | Homo sapiens | 37,364 | 5-Nov-98 |
| | | GB_PR2: HUAC002038 | 161973 | AC002038 | Homo sapiens chromosome 2 clone 101B6 map 2p11, complete sequence. | Homo sapiens | 36,404 | 30-Jun-97 |
| | | GB_HTG3: AC010791 | 111643 | AC010791 | Homo sapiens chromosome 17 clone 6_M_14 map 17, *** SEQUENCING IN | Homo sapiens | 34,293 | 22-Sep-99 |
| | | | | | PROGRESS ***, 8 unordered pieces. | | | |
| rxa02568 | 1753 | GB_BA1: FT16SRNAA | 1521 | Z21931 | F. tularensis 16S rRNA. | Francisella tularensis | 39,065 | 5-Jun-97 |
| | | GB_BA1: FT16SRNAB | 1520 | Z21932 | F. tularensis 16S rRNA. | Francisella tularensis | 37,807 | 16-DEC-1997 |
| | | GB_BA1: FP16SRNAA | 1518 | Z21933 | F. philomiragia 16S rRNA. | Francisella philomiragia | 36,380 | 5-Jun-97 |
| rxa02569 | 873 | GB_GSS13: AQ469518 | 553 | AQ469518 | CITBI-E1-2596J20.TR CITBI-E1 Homo sapiens genomic clone 2596J20, | Homo sapiens | 39,201 | 23-Apr-99 |
| | | | | | genomic survey sequence. | | | |
| | | GB_GSS12: AQ403903 | 495 | AQ403903 | HS_5058_B1_F07_T7A RPCI-11 Human Male BAC Library Homo sapiens | Homo sapiens | 36,049 | 13-MAR-1999 |
| | | | | | genomic clone Plate = 634 Col = 13 Row = L, | | | |
| | | | | | genomic survey sequence. | | | |
| | | GB_PR2: AF004715 | 2889 | AF004715 | Homo sapiens jerky gene product homolog mRNA, complete cds. | Homo sapiens | 35,689 | 6-Aug-97 |
| rxa02570 | 765 | GB_BA1: CGU43535 | 2531 | U43535 | Corynebacterium glutamicum multidrug resistance protein (cmr) gene, complete cds. | Corynebacterium | 38,165 | 9-Apr-97 |
| | | | | | | glutamicum | | |
| | | GB_EST33: AI776398 | 499 | AI776398 | EST257498 tomato resistant, Cornell Lycopersicon esculentum | Lycopersicon esculentum | 42,084 | 29-Jun-99 |
| | | | | | cDNA clone cLER18I10, mRNA sequence. | | | |
| | | GB_EST23: AI119807 | 431 | AI119807 | uc21a06.r1 Soares mouse mammary gland NbMMG Mus musculus cDNA | Mus musculus | 40,281 | 2-Sep-98 |
| | | | | | clone IMAGE: 1398610 5′, mRNA sequence. | | | |
| rxa02573 | | | | | | | | |
| rxa02575 | 1258 | GB_BA1: SCGD3 | 33779 | AL096822 | Streptomyces coelicolor cosmid GD3. | Streptomyces coelicolor | 39,742 | 8-Jul-99 |
| | | GB_RO: AC002108 | 41125 | AC002108 | Genomic sequence from Mouse 4, complete sequence. | Mus musculus | 36,100 | 29-MAY-1997 |
| | | GB_PR1: HUMIDS | 36845 | L35485 | Homo sapiens iduronate sulphate sulphatase (IDS) gene, complete cds. | Homo sapiens | 34,183 | 16-Aug-94 |
| rxa02576 | 1545 | GB_GSS15: AQ618143 | 582 | AQ618143 | HS_5168_B1_H08_T7A RPCI-11 Human Male BAC Library Homo sapiens | Homo sapiens | 34,874 | 15-Jun-99 |
| | | | | | genomic clone Plate = 744 Col = 15 Row = P, | | | |
| | | | | | genomic survey sequence. | | | |
| | | GB_OV: XLFB1A1 | 2172 | X64759 | X. laevis mRNA for transcription factor (clone XLFB1a1). | Xenopus laevis | 38,589 | 26-Jan-93 |
| | | GB_PR4: AC005039 | 151316 | AC005039 | Homo sapiens clone NH0512E16, complete sequence. | Homo sapiens | 33,575 | 14-Jan-99 |
| rxa02577 | 1008 | GB_PL2: AF034976 | 7130 | AF034976 | Pilayella littoralis ribosomal protein S14 (rps14) gene, partial cds; | Mitochondrion Pilayella | 34,690 | 22-Jun-98 |
| | | | | | ATPase subunit 8 (atp8) gene, complete cds; tRNA-Ser gene, complete | littoralis | | |
| | | | | | sequence; ribosomal protein S10 (rps10) and ribosomal protein L31 (rpl31) genes, | | | |
| | | | | | complete cds; tRNA-Ser gene, complete sequence; T7-like RNA polymerase (rpox) | | | |
| | | | | | gene, complete cds; and unknown genes, mitochondrial genes for mitochondrial | | | |
| | | | | | products. | | | |
| | | GB_EST30: AI655188 | 456 | AI655188 | wb67g02.x1 NCI_CGAP_GC6 Homo sapiens cDNA clone IMAGE: | Homo sapiens | 39,198 | 04-MAY-1999 |
| | | | | | 2310770 3′, mRNA sequence. | | | |
| | | GB_PL2: AF034976 | 7130 | AF034976 | Pilayella littoralis ribosomal protein S14 (rps14) gene, partial cds; ATPase | Mitochondrion Pilayella | 39,959 | 22-Jun-98 |
| | | | | | subunit 8 (atp8) gene, complete cds; tRNA-Ser gene, complete sequence; ribosomal | littoralis | | |
| | | | | | protein S10 (rps10) and ribosomal protein L31 (rpl31) genes, complete cds; tRNA-Ser | | | |
| | | | | | gene, complete sequence; T7-like RNA polymerase (rpox) gene, complete cds; | | | |
| | | | | | and unknown genes, mitochondrial genes for mitochondrial products. | | | |
| rxa02584 | 474 | GB_PR2: AP000191 | 100000 | AP000191 | Homo sapiens genomic DNA, chromosome 21q22.1, D21S226-AML | Homo sapiens | 37,199 | 20-Nov-99 |
| | | | | | region, clone Q78C10-f32E9, segment 18/21, | | | |
| | | | | | complete sequence. | | | |
| | | GB_EST13: AA349881 | 293 | AA349881 | EST56832 Infant brain Homo sapiens cDNA 5′ end similar to EST | Homo sapiens | 42,466 | 21-Apr-97 |
| | | | | | containing Alu repeat, mRNA sequence. | | | |
| | | GB_EST23: AI078215 | 404 | AI078215 | oz12h12.x1 Soares_fetal_liver_spleen_1NFLS_S1 Homo sapiens | Homo sapiens | 48,780 | 29-Sep-98 |
| | | | | | cDNA clone IMAGE: 1675175 3′ similar to contains Alu repetitive element; | | | |
| | | | | | contains element THR repetitive element;, mRNA sequence. | | | |
| rxa02585 | 1104 | GB_PR2: AP000115 | 100000 | AP000115 | Homo sapiens genomic DNA of 21q22.1, GART and AML related, | Homo sapiens | 35,502 | 25-Sep-99 |
| | | | | | Q78C10-149C3 region, segment 18/20, complete sequence. | | | |
| | | GB_PR2: AP000191 | 100000 | AP000191 | Homo sapiens genomic DNA, chromosome 21q22.1, D21S226-AML region, clone | Homo sapiens | 35,502 | 20-Nov-99 |
| | | | | | Q78C10-f32E9, segment 18/21, complete sequence. | | | |
| | | GB_PR2: AP000047 | 50188 | AP000047 | Homo sapiens genomic DNA, chromosome | Homo sapiens | 35,502 | 20-Nov-99 |
| | | | | | 21q22.1, segment 18/28, complete sequence. | | | |
| rxa02588 | 807 | GB_BA1: MTCY8D5 | 39730 | Z92669 | Mycobacterium tuberculosis H37Rv complete genome; segment 12/162. | Mycobacterium | 38,354 | 18-Jun-98 |
| | | | | | | tuberculosis | | |
| | | GB_BA1: MTCY349 | 43523 | Z83018 | Mycobacterium tuberculosis H37Rv complete genome; segment 131/162. | Mycobacterium | 39,949 | 17-Jun-98 |
| | | | | | | tuberculosis | | |
| | | GB_HTG2: AC007879 | 158841 | AC007879 | Homo sapiens clone NH0309L06, *** SEQUENCING IN | Homo sapiens | 36,835 | 31-Jul-99 |
| | | | | | PROGRESS ***, 2 unordered pieces. | | | |
| rxa02591 | 1953 | GB_BA1: MTCY8D5 | 39730 | Z92669 | Mycobacterium tuberculosis H37Rv complete genome; segment 12/162. | Mycobacterium | 65,398 | 18-Jun-98 |
| | | | | | | tuberculosis | | |
| | | GB_BA1: MLCL622 | 42498 | Z95398 | Mycobacterium leprae cosmid L622. | Mycobacterium leprae | 63,875 | 24-Jun-97 |
| | | GB_BA1: CHBATP2OP | 5477 | L08777 | Chlorobium limicola atp2 operon. | Chlorobium limicola | 37,979 | 26-Apr-93 |
| rxa02593 | 720 | GB_GSS1: CNS0056G | 994 | AL057090 | Drosophila melanogaster genome survey sequence T7 end of | Drosophila melanogaster | 27,206 | 3-Jun-99 |
| | | | | | BAC # BACR11M23 of RPCI-98 library from Drosophila melanogaster (fruit fly), | | | |
| | | | | | genomic survey sequence. | | | |
| | | GB_GSS1: CNS0056G | 994 | AL057090 | Drosophila melanogaster genome survey sequence T7 end of | Drosophila melanogaster | 30,270 | 3-Jun-99 |
| | | | | | BAC # BACR11M23 of RPCI-98 library from Drosophila melanogaster (fruit fly), | | | |
| | | | | | genomic survey sequence. | | | |
| rxa02598 | 714 | GB_IN1: PFMAL3P5 | 86829 | AL034556 | Plasmodium falciparum MAL3P5, complete sequence. | Plasmodium falciparum | 40,057 | 04-OCT-1999 |
| | | GB_PL1: AB024026 | 23026 | AB024026 | Arabidopsis thaliana genomic DNA, chromosome 5, TAC | Arabidopsis thaliana | 38,865 | 20-Nov-99 |
| | | | | | clone: K15O15, complete sequence. | | | |
| | | GB_BA2: AE000930 | 15553 | AE000930 | Methanobacterium thermoautotrophicum from bases 1592014 to 1607566 | Methanobacterium | 36,804 | 15-Nov-97 |
| | | | | | (section 136 of 148) of the complete genome. | thermoautotrophicum | | |
| rxa02600 | 1521 | GB_IN2: AC004301 | 68620 | AC004301 | Drosophila melanogaster DNA sequence (P1 DS07134 (D192)), complete sequence. | Drosophila melanogaster | 36,063 | 29-MAY-1998 |
| | | GB_PL2: AC007504 | 125021 | AC007504 | Arabidopsis thaliana chromosome I BAC F13F21 genomic | Arabidopsis thaliana | 37,074 | 9-Jul-99 |
| | | | | | sequence, complete sequence. | | | |
| | | GB_PH: AF125520 | 61670 | AF125520 | Bacteriophage 933W, complete genome. | Bacteriophage 933W | 35,396 | 16-Apr-99 |
| rxa02601 | 2112 | GB_BA1: MTV026 | 23740 | AL022076 | Mycobacterium tuberculosis H37Rv complete genome; segment 157/162. | Mycobacterium | 38,676 | 24-Jun-99 |
| | | | | | | tuberculosis | | |
| | | GB_BA2: SSU73128 | 2331 | U73128 | Sphingomonas sp. A8AN3 catechol 2,3-dioxygenase gene, | Sphingomonas sp. A8AN3 | 40,020 | 1-Feb-99 |
| | | | | | complete cds and 2-hydroxymuconic semialdehyde hydrolase and | | | |
| | | | | | 2-hydroxymuconic semialdehyde dehydrogenase genes, partial cds. | | | |
| | | GB_BA2: SSU73128 | 2331 | U73128 | Sphingomonas sp. A8AN3 catechol 2,3-dioxygenase gene, | Sphingomonas sp. A8AN3 | 40,101 | 1-Feb-99 |
| | | | | | complete cds and 2-hydroxymuconic semialdehyde hydrolase and | | | |
| | | | | | 2-hydroxymuconic semialdehyde dehydrogenase genes, partial cds. | | | |
| rxa02602 | 627 | GB_PR3: AF006751 | 3106 | AF006751 | Homo sapiens ES/130 mRNA, complete cds. | Homo sapiens | 37,582 | 10-Jul-98 |
| | | GB_PR3: AF006751 | 3106 | AF006751 | Homo sapiens ES/130 mRNA, complete cds. | Homo sapiens | 38,462 | 10-Jul-98 |
| | | GB_GSS9: AQ090116 | 404 | AQ090116 | HS_3000_B1_E09_MF CIT Approved Human Genomic Sperm | Homo sapiens | 39,481 | 26-Aug-98 |
| | | | | | Library D Homo sapiens genomic clone Plate = 3000 | | | |
| | | | | | Col = 17 Row = J, genomic survey sequence. | | | |
| rxa02604 | 2199 | GB_PL1: CREHIH3G | 4358 | L41841 | Chlamydomonas reinhardtii histone H3, histone H4, histone H2B, | Chlamydomonas reinhardtii | 37,500 | 16-MAY-1996 |
| | | | | | and histone H2A genes, complete cds. | | | |
| | | GB_GSS13: AQ455681 | 621 | AQ455681 | HS_5068_B1_E01_T7A RPCI-11 Human Male BAC Library Homo sapiens | Homo sapiens | 36,246 | 21-Apr-99 |
| | | | | | genomic clone Plate = 644 Col = 1 Row = J, | | | |
| | | | | | genomic survey sequence. | | | |
| | | GB_GSS6: AQ829471 | 392 | AQ829471 | HS_5442_A2_F11_SP6E RPCI-11 Human Male BAC Library Homo sapiens | Homo sapiens | 42,347 | 27-Aug-99 |
| | | | | | genomic clone Plate = 1018 Col = 22 Row = K, | | | |
| | | | | | genomic survey sequence. | | | |
| rxa02606 | 1494 | GB_PAT: A26027 | 2547 | A26027 | C. melassecola gene for extracellular antigen PS1. | Corynebacterium | 42,857 | 2-Apr-95 |
| | | | | | | melassecola | | |
| | | GB_BA1: CGCOP1G | 2547 | X66078 | C. glutamicum cop1 gene for PS1. | Corynebacterium | 42,857 | 30-Jun-93 |
| | | | | | | glutamicum | | |
| | | GB_PR2: AP000134 | 100000 | AP000134 | Homo sapiens genomic DNA of 21q22.1, GART and AML, f43D11-119B8 | Homo sapiens | 36,145 | 25-Sep-99 |
| | | | | | region, segment 9/10, complete sequence. | | | |
| rxa02609 | 372 | GB_HTG3: AC009212 | 125452 | AC009212 | Drosophila melanogaster chromosome 3 clone BACR01A18 (D669) | Drosophila melanogaster | 35,753 | 23-Aug-99 |
| | | | | | RPCI-98 01.A.18 map 82E-82F strain y; cn bw sp, *** SEQUENCING IN | | | |
| | | | | | PROGRESS***, 119 unordered pieces. | | | |
| | | GB_HTG3: AC009212 | 125452 | AC009212 | Drosophila melanogaster chromosome 3 clone BACR01A18 (D669) | Drosophila melanogaster | 35,753 | 23-Aug-99 |
| | | | | | RPCI-98 01.A.18 map 82E-82F strain y; cn bw sp, *** SEQUENCING IN | | | |
| | | | | | PROGRESS***, 119 unordered pieces. | | | |
| | | GB_HTG2: AC007589 | 134659 | AC007589 | Drosophila melanogaster chromosome 3 clone BACR20D10 (D667) | Drosophila melanogaster | 35,484 | 2-Aug-99 |
| | | | | | RPCI-98 20.D.10 map 82D-82E strain y; cn bw sp, *** SEQUENCING IN | | | |
| | | | | | PROGRESS ***, 73 unordered pieces. | | | |
| rxa02610 | 1050 | GB_BA2: AF073776 | 5138 | AF073776 | Pseudomonas aeruginosa MexZ (mexZ), complete cds; and | Pseudomonas aeruginosa | 38,323 | 19-OCT-1998 |
| | | | | | mexGH operon, complete sequence. | | | |
| | | GB_BA1: AB015853 | 5461 | AB015853 | Pseudomonas aeruginosa gene for MexX and MexY, complete cds. | Pseudomonas aeruginosa | 38,447 | 13-Nov-98 |
| | | GB_VI: HIM237805 | 2400 | AJ237805 | Human immunodeficiency virus type 1 partial envelope gene (gp160), isolate MP255. | Human immunodeficiency | 37,928 | 15-Jun-99 |
| | | | | | | virus type 1 | | |
| rxa02617 | 630 | GB_PR2: HSL81781 | 4041 | L81781 | Homo sapiens (subclone 7_e4 from P1 H25) DNA sequence, complete sequence. | Homo sapiens | 38,835 | 9-Apr-97 |
| | | GB_HTG3: AC011430 | 106902 | AC011430 | Homo sapiens chromosome 5 clone P1_660D11, *** SEQUENCING IN | Homo sapiens | 38,662 | 06-OCT-1999 |
| | | | | | PROGRESS ***, 28 unordered pieces. | | | |
| | | GB_HTG3: AC011430 | 106902 | AC011430 | Homo sapiens chromosome 5 clone P1_660D11, *** SEQUENCING IN | Homo sapiens | 38,662 | 06-OCT-1999 |
| | | | | | PROGRESS ***, 28 unordered pieces. | | | |
| rxa02619 | 1023 | GB_BA1: CGL133719 | 1839 | AJ133719 | Corynebacterium glutamicum yjcc gene, amtR gene and citE gene, partial. | Corynebacterium | 100,000 | 12-Aug-99 |
| | | | | | | glutamicum | | |
| | | GB_BA1: CGL133719 | 1839 | AJ133719 | Corynebacterium glutamicum yjcc gene, amtR gene and citE gene, partial. | Corynebacterium | 100,000 | 12-Aug-99 |
| | | | | | | glutamicum | | |
| | | GB_EST18: AA734344 | 378 | AA734344 | vv24f02.r1 Stratagene mouse heart (#937316) Mus musculus cDNA | Mus musculus | 37,968 | 7-Jan-98 |
| | | | | | clone IMAGE: 1223355 5′, mRNA sequence. | | | |
| rxa02620 | 789 | GB_BA1: CGL133719 | 1839 | AJ133719 | Corynebacterium glutamicum yjcc gene, amtR gene and citE gene, partial. | Corynebacterium | 100,000 | 12-Aug-99 |
| | | | | | | glutamicum | | |
| | | GB_BA1: CGL133719 | 1839 | AJ133719 | Corynebacterium glutamicum yjcc gene, amtR gene and citE gene, partial. | Corynebacterium | 100,000 | 12-Aug-99 |
| | | | | | | glutamicum | | |
| | | GB_EST16: C27457 | 252 | C27457 | C27457 Rice callus cDNA Oryza sativa cDNA clone C51917_1A, mRNA sequence. | Oryza sativa | 39,044 | 6-Aug-97 |
| rxa02624 | 1419 | GB_HTG2: AC005995 | 170023 | AC005995 | Homo sapiens clone DJ0042M02, *** SEQUENCING IN PROGRESS ***, | Homo sapiens | 38,533 | 23-Apr-99 |
| | | | | | 13 unordered pieces. | | | |
| | | GB_HTG2: AC005995 | 170023 | AC005995 | Homo sapiens clone DJ0042M02, *** SEQUENCING IN | Homo sapiens | 38,533 | 23-Apr-99 |
| | | | | | PROGRESS ***, 13 unordered pieces. | | | |
| | | GB_PR4: AC004895 | 152927 | AC004895 | Homo sapiens clone DJ0810E06, complete sequence. | Homo sapiens | 38,533 | 29-MAY-1999 |
| rxa02639 | 957 | GB_BA1: MSGY409 | 41321 | AD000017 | Mycobacterium tuberculosis sequence from clone y409. | Mycobacterium | 50,370 | 10-DEC-1996 |
| | | | | | | tuberculosis | | |
| | | GB_BA1: MTCY409 | 30352 | Z97188 | Mycobacterium tuberculosis H37Rv complete genome; segment 158/162. | Mycobacterium | 38,039 | 17-Jun-98 |
| | | | | | | tuberculosis | | |
| | | GB_HTG2: AC006765 | 274498 | AC006765 | Caenorhabditis elegans clone Y43H11, *** SEQUENCING IN | Caenorhabditis elegans | 35,225 | 23-Feb-99 |
| | | | | | PROGRESS***, 7 unordered pieces. | | | |
| rxa02647 | 585 | GB_PAT: A45577 | 1925 | A45577 | Sequence 1 from Patent WO9519442. | Corynebacterium | 37,545 | 07-MAR-1997 |
| | | | | | | glutamicum | | |
| | | GB_PAT: A45579 | 1925 | A45579 | Sequence 3 from Patent WO9519442. | Corynebacterium | 37,545 | 07-MAR-1997 |
| | | | | | | glutamicum | | |
| | | GB_PAT: A45581 | 1925 | A45581 | Sequence 5 from Patent WO9519442. | Corynebacterium | 37,545 | 07-MAR-1997 |
| | | | | | | glutamicum | | |
| rxa02649 | 1125 | GB_BA1: D90904 | 150894 | D90904 | Synechocystis sp. PCC6803 complete genome, 6/27, 630555-781448. | Synechocystis sp. | 37,772 | 7-Feb-99 |
| | | GB_PR3: HS941F9 | 127587 | Z95331 | Human DNA sequence from BAC 941F9 on chromosome 22q11.2-qter. | Homo sapiens | 38,748 | 23-Nov-99 |
| | | | | | Contains ESTs, STSs and 3′ part of FIBULIN-1 D PRECURSOR | | | |
| | | | | | like gene, part of a Brain Protein E46 like gene and a CpG | | | |
| | | | | | island, complete sequence. | | | |
| | | GB_BA1: D90904 | 150894 | D90904 | Synechocystis sp. PCC6803 complete genome, 6/27, 630555-781448. | Synechocystis sp. | 36,364 | 7-Feb-99 |
| rxa02652 | 702 | GB_BA2: AF048749 | 24454 | AF048749 | Bacteroides fragilis capsular polysaccharide biosynthesis operon, complete sequence. | Bacteroides fragilis | 37,464 | 25-Jun-99 |
| | | GB_HTG4: AC009244 | 318775 | AC009244 | Homo sapiens chromosome 7, *** SEQUENCING IN | Homo sapiens | 35,447 | 26-OCT-1999 |
| | | | | | PROGRESS ***, 36 unordered pieces. | | | |
| | | GB_HTG4: AC009244 | 318775 | AC009244 | Homo sapiens chromosome 7, *** SEQUENCING IN | Homo sapiens | 35,447 | 26-OCT-1999 |
| | | | | | PROGRESS ***, 36 unordered pieces. | | | |
| rxa02655 | 1107 | GB_EST10: AA185699 | 290 | AA185699 | mt62d11.r1 Soares 2NbMT Mus musculus cDNA clone IMAGE: 634485 | Mus musculus | 39,510 | 19-Feb-97 |
| | | | | | 5′ similar to TR: G300372 G300372 CELL GROWTH REGULATING | | | |
| | | | | | NUCLEOLAR PROTEIN.;, mRNA sequence. | | | |
| | | GB_GSS13: AQ429764 | 439 | AQ429764 | HS_5079_A2_C12_SP6E RPCI-11 Human Male BAC Library Homo sapiens | Homo sapiens | 37,701 | 31-MAR-1999 |
| | | | | | genomic clone Plate = 655 Col = 24 Row = E, | | | |
| | | | | | genomic survey sequence. | | | |
| | | GB_GSS8: AQ012380 | 646 | AQ012380 | CIT-HSP-2300L9.TF CIT-HSP Homo sapiens genomic clone 2300L9, | Homo sapiens | 38,874 | 6-Jun-98 |
| | | | | | genomic survey sequence. | | | |
| rxa02662 | 387 | GB_HTG2: AC007802 | 118569 | AC007802 | Drosophila melanogaster chromosome 2 clone BACR07I11 (D648) | Drosophila melanogaster | 37,696 | 2-Aug-99 |
| | | | | | RPCI-98 07.I.11 map 58A1-58A2 strain y; cn bw sp, *** SEQUENCING IN | | | |
| | | | | | PROGRESS ***, 70 unordered pieces. | | | |
| | | GB_HTG2: AC007802 | 118569 | AC007802 | Drosophila melanogaster chromosome 2 clone BACR07I11 (D648) | Drosophila melanogaster | 37,696 | 2-Aug-99 |
| | | | | | RPCI-98 07.I.11 map 58A1-58A2 strain y; cn bw sp, *** SEQUENCING IN | | | |
| | | | | | PROGRESS ***, 70 unordered pieces. | | | |
| | | GB_HTG2: AC007802 | 118569 | AC007802 | Drosophila melanogaster chromosome 2 clone BACR07I11 (D648) | Drosophila melanogaster | 35,616 | 2-Aug-99 |
| | | | | | RPCI-98 07.I.11 map 58A1-58A2 strain y; cn bw sp, *** SEQUENCING IN | | | |
| | | | | | PROGRESS ***, 70 unordered pieces. | | | |
| rxa02665 | 603 | GB_HTG1: AC002419 | 128340 | AC002419 | Homo sapiens chromosome X clone bWXD40, *** SEQUENCING IN | Homo sapiens | 32,941 | 12-Aug-97 |
| | | | | | PROGRESS***, 2 unordered pieces. | | | |
| | | GB_HTG1: AC002419 | 128340 | AC002419 | Homo sapiens chromosome X clone bWXD40, *** SEQUENCING IN | Homo sapiens | 32,941 | 12-Aug-97 |
| | | | | | PROGRESS ***, 2 unordered pieces. | | | |
| | | GB_GSS15: AQ655091 | 630 | AQ655091 | Sheared DNA-21B5.TF Sheared DNA Trypanosoma brucei | Trypanosoma brucei | 41,794 | 22-Jun-99 |
| | | | | | genomic clone Sheared DNA-21B5, genomic survey sequence. | | | |
| rxa02670 | 705 | GB_HTG2: AC006450 | 177555 | AC006450 | Homo sapiens chromosome 9 clone hRPK.85_O_21 map 9, *** | Homo sapiens | 41,374 | 15-Jul-99 |
| | | | | | SEQUENCING IN PROGRESS ***, 2 ordered pieces. | | | |
| | | GB_HTG2: AC006450 | 177555 | AC006450 | Homo sapiens chromosome 9 clone hRPK.85_O_21 map 9, *** | Homo sapiens | 41,374 | 15-Jul-99 |
| | | | | | SEQUENCING IN PROGRESS ***, 2 ordered pieces. | | | |
| | | GB_BA1: SPU86147 | 2268 | U86147 | Synechococcus PCC7942 UDP-N-acetylmuramate-alanine ligase (murC) | Synechococcus PCC7942 | 40,177 | 15-Feb-97 |
| | | | | | gene, partial cds, UDP-N- acetylenolpyruvylglucosamine reductase (murB), | | | |
| | | | | | and mercuric resistance operon regulatory protein (merR) genes, | | | |
| | | | | | complete cds. | | | |
| rxa02672 | 1221 | GB_BA1: MTV024 | 8189 | AL022075 | Mycobacterium tuberculosis H37Rv complete genome; segment 151/162. | Mycobacterium | 53,197 | 17-Jun-98 |
| | | | | | | tuberculosis | | |
| | | GB_BA1: MSGY23 | 40806 | AD000016 | Mycobacterium tuberculosis sequence from clone y23. | Mycobacterium | 37,500 | 10-DEC-1996 |
| | | | | | | tuberculosis | | |
| | | GB_EST38: AW029724 | 634 | AW029724 | EST272979 tomato callus, TAMU Lycopersicon esculentum cDNA clone | Lycopersicon esculentum | 40,000 | 15-Sep-99 |
| | | | | | cLEC28I17 similar to beta- ketoacyl-ACP synthase, putative, | | | |
| | | | | | mRNA sequence. | | | |
| rxa02673 | 756 | GB_GSS12: AQ356661 | 518 | AQ356661 | CITBI-E1-2531G11.TF CITBI-E1 Homo sapiens genomic | Homo sapiens | 33,022 | 24-Jan-99 |
| | | | | | clone 2531G11, genomic survey sequence. | | | |
| | | GB_IN1: CELC50A2 | 36582 | AF036689 | Caenorhabditis elegans cosmid C50A2. | Caenorhabditis elegans | 35,443 | 05-DEC-1997 |
| | | GB_HTG2: AC006702 | 299864 | AC006702 | Caenorhabditis elegans clone Y104H12b, *** SEQUENCING IN | Caenorhabditis elegans | 35,443 | 23-Feb-99 |
| | | | | | PROGRESS ***, 3 unordered pieces. | | | |
| rxa02678 | 1041 | GB_HTG1: AP000452 | 83103 | AP000452 | Homo sapiens chromosome 11 clone PAC2 map 11q11, *** SEQUENCING IN | Homo sapiens | 35,098 | 13-Sep-99 |
| | | | | | PROGRESS ***, in unordered pieces. | | | |
| | | GB_HTG1: AP000452 | 83103 | AP000452 | Homo sapiens chromosome 11 clone PAC2 map 11q11, *** SEQUENCING IN | Homo sapiens | 35,098 | 13-Sep-99 |
| | | | | | PROGRESS ***, in unordered pieces. | | | |
| | | GB_PR3: HS498I24 | 58190 | AL031057 | Human DNA sequence from clone 498I24 on chromosome 6p22.1-22.3 | Homo sapiens | 35,328 | 23-Nov-99 |
| | | | | | Contains STS, GSS and a CpG island, complete sequence. | | | |
| rxa02680 | 1407 | GB_BA1: MLCB268 | 38859 | AL022602 | Mycobacterium leprae cosmid B268. | Mycobacterium leprae | 37,797 | 27-Aug-99 |
| | | GB_BA1: MSGB1554CS | 36548 | L78814 | Mycobacterium leprae cosmid B1554 DNA sequence. | Mycobacterium leprae | 36,900 | 15-Jun-96 |
| | | GB_BA1: MSGB1551CS | 36548 | L78813 | Mycobacterium leprae cosmid B1551 DNA sequence. | Mycobacterium leprae | 36,900 | 15-Jun-96 |
| rxa02683 | | | | | | | | |
| rxa02685 | 780 | GB_HTG3: AC008640 | 198483 | AC008640 | Homo sapiens chromosome 5 clone CIT978SKB_17P2, *** SEQUENCING | Homo sapiens | 37,299 | 3-Aug-99 |
| | | | | | IN PROGRESS ***, 70 unordered pieces. | | | |
| | | GB_HTG3: AC008640 | 198483 | AC008640 | Homo sapiens chromosome 5 clone CIT978SKB_17P2, *** SEQUENCING | Homo sapiens | 37,299 | 3-Aug-99 |
| | | | | | IN PROGRESS ***, 70 unordered pieces. | | | |
| | | GB_BA2: AE000945 | 11317 | AE000945 | Archaeoglobus fulgidus section 162 of 172 of the complete genome. | Archaeoglobus fulgidus | 38,760 | 15-DEC-1997 |
| rxa02688 | 792 | GB_BA1: CORPHEA | 1088 | M13774 | C. glutamicum pheA gene encoding prephenate dehydratase, complete cds. | Corynebacterium | 100,000 | 26-Apr-93 |
| | | | | | | glutamicum | | |
| | | GB_HTG2: AC007554 | 167095 | AC007554 | Homo sapiens clone hRPK.74_A_1, *** SEQUENCING IN PROGRESS ***, | Homo sapiens | 35,226 | 14-MAY-1999 |
| | | | | | 10 unordered pieces. | | | |
| | | GB_HTG2: AC007554 | 167095 | AC007554 | Homo sapiens clone hRPK.74_A_1, *** SEQUENCING IN PROGRESS ***, | Homo sapiens | 35,226 | 14-MAY-1999 |
| | | | | | 10 unordered pieces. | | | |
| rxa02689 | 465 | GB_GSS9: AQ110873 | 414 | AQ110873 | CIT-HSP-2378K10.TR CIT-HSP Homo sapiens genomic clone 2378K10, | Homo sapiens | 34,768 | 29-Aug-98 |
| | | | | | genomic survey sequence. | | | |
| | | GB_OV: DUKFASA | 9138 | M21635 | Duck (A. platyrhynchos) S-acyl fatty acid synthase thioesterase gene, complete cds. | Anas platyrhynchos | 39,177 | 28-Apr-93 |
| | | GB_OV: DUKFASA | 9138 | M21635 | Duck (A. platyrhynchos) S-acyl fatty acid synthase thioesterase gene, complete cds. | Anas platyrhynchos | 35,022 | 28-Apr-93 |
| rxa02690 | 1221 | GB_HTG4: AC010096 | 223607 | AC010096 | Homo sapiens chromosome unknown clone NH0364A16, | Homo sapiens | 39,301 | 29-OCT-1999 |
| | | | | | WORKING DRAFT SEQUENCE, in unordered pieces. | | | |
| | | GB_HTG4: AC010096 | 223607 | AC010096 | Homo sapiens chromosome unknown clone NH0364A16, | Homo sapiens | 39,301 | 29-OCT-1999 |
| | | | | | WORKING DRAFT SEQUENCE, in unordered pieces. | | | |
| | | GB_BA2: AF132788 | 1411 | AF132788 | Fischerella muscicola small subunit ribosomal RNA gene, partial sequence. | Fischerella muscicola | 36,156 | 1-Sep-99 |
| rxa02693 | 1899 | GB_GSS5: AQ784372 | 542 | AQ784372 | HS_3181_A2_H12_T7C CIT Approved Human Genomic Sperm Library D | Homo sapiens | 41,546 | 3-Aug-99 |
| | | | | | Homo sapiens genomic clone Plate = 3181 Col = 24 Row = O, genomic | | | |
| | | | | | survey sequence. | | | |
| | | GB_HTG4: AC010573 | 80511 | AC010573 | Drosophila melanogaster chromosome 3L/70C12 clone RPCI98-2M13, | Drosophila melanogaster | 36,839 | 16-OCT-1999 |
| | | | | | *** SEQUENCING IN PROGRESS ***, 45 unordered pieces. | | | |
| | | GB_EST18: AA696238 | 640 | AA696238 | GM05354.5prime GM Drosophila melanogaster ovary BlueScript | Drosophila melanogaster | 39,523 | 28-Nov-98 |
| | | | | | Drosophila melanogaster cDNA clone GM05354 5prime, mRNA sequence. | | | |
| rxa02696 | 579 | GB_BA1: AB003132 | 4116 | AB003132 | Corynebacterium glutamicum gene for MurC, FtsQ, FtsZ, complete cds. | Corynebacterium | 100,000 | 4-Aug-97 |
| | | | | | | glutamicum | | |
| | | GB_PR4: AC006024 | 90583 | AC006024 | Homo sapiens PAC clone DJ1166G19 from 7p12-p11.2, complete sequence. | Homo sapiens | 36,049 | 20-Feb-99 |
| | | GB_HTG1: HSJ657D12 | 315458 | AL109943 | Homo sapiens chromosome X clone RP4-657D12 map q22.1-24, | Homo sapiens | 36,475 | 24-Nov-99 |
| | | | | | *** SEQUENCING IN PROGRESS ***, in unordered pieces. | | | |
| rxa02697 | 1650 | GB_EST20: AA874010 | 365 | AA874010 | vw87b05.r1 Stratagene mouse skin (#937313) Mus musculus cDNA clone | Mus musculus | 39,452 | 19-MAR-1998 |
| | | | | | IMAGE: 1261905 5′, mRNA sequence. | | | |
| | | GB_EST30: AI658486 | 599 | AI658486 | tu17a09.x1 NCI_CGAP_Pr28 Homo sapiens cDNA clone IMAGE: | Homo sapiens | 37,324 | 10-MAY-1999 |
| | | | | | 2251288 3′, mRNA sequence. | | | |
| | | GB_EST20: AA874010 | 365 | AA874010 | vw87b05.r1 Stratagene mouse skin (#937313) Mus musculus cDNA clone | Mus musculus | 39,452 | 19-MAR-1998 |
| | | | | | IMAGE: 1261905 5′, mRNA sequence. | | | |
| rxa02700 | 1359 | GB_BA1: SCF85 | 21420 | AL110470 | Streptomyces coelicolor cosmid F85. | Streptomyces coelicolor | 39,497 | 1-Sep-99 |
| | | | | | | A3(2) | | |
| | | GB_HTG5: AC011629 | 69344 | AC011629 | Homo sapiens chromosome 15 clone 334_M_8 map 15, | Homo sapiens | 37,462 | 13-Nov-99 |
| | | | | | LOW-PASS SEQUENCE SAMPLING. | | | |
| | | GB_HTG3: AC010106 | 157581 | AC010106 | Homo sapiens clone NH0575J05, *** SEQUENCING | Homo sapiens | 36,220 | 11-Sep-99 |
| | | | | | IN PROGRESS ***, 1 unordered pieces. | | | |
| rxa02701 | 1431 | GB_BA1: MTCI65 | 34331 | Z95584 | Mycobacterium tuberculosis H37Rv complete genome; segment 50/162. | Mycobacterium | 41,867 | 17-Jun-98 |
| | | | | | | tuberculosis | | |
| | | GB_BA1: MSGY348 | 40056 | AD000020 | Mycobacterium tuberculosis sequence from clone y348. | Mycobacterium | 43,338 | 10-DEC-1996 |
| | | | | | | tuberculosis | | |
| | | GB_PR2: AP000117 | 151516 | AP000117 | Homo sapiens genomic DNA of 21q22.1, GART and AML related, | Homo sapiens | 36,037 | 25-Sep-99 |
| | | | | | Q78C10-149C3 region, segment 20/20, complete sequence. | | | |
| rxa02712 | 918 | GB_BA2: AF124600 | 4115 | AF124600 | Corynebacterium glutamicum chorismate synthase (aroC), shikimate | Corynebacterium | 37,294 | 04-MAY-1999 |
| | | | | | kinase (aroK), and 3- dehydroquinate synthase (aroB) genes, | glutamicum | | |
| | | | | | complete cds; and putative cytoplasmic peptidase (pepQ) gene, | | | |
| | | | | | partial cds. | | | |
| | | GB_BA2: AF053071 | 1083 | AF053071 | Corynebacterium glutamicum dehydroquinate synthetase (aroB) gene, complete cds. | Corynebacterium | 39,675 | 12-Sep-98 |
| | | | | | | glutamicum | | |
| | | GB_BA1: BSTHRZ | 19861 | Z80360 | B. subtilis thrZ downstream chromosomal region. | Bacillus subtilis | 34,002 | 24-Jun-98 |
| rxa02714 | 552 | GB_PL2: ATF9F13 | 109936 | AL080253 | Arabidopsis thaliana DNA chromosome 4, BAC clone F9F13 (ESSA project). | Arabidopsis thaliana | 39,252 | 16-Aug-99 |
| | | GB_PL2: ATT29H11 | 87011 | AL049659 | Arabidopsis thaliana DNA chromosome 3, BAC clone T29H11. | Arabidopsis thaliana | 34,249 | 9-Jun-99 |
| | | GB_EST4: H37460 | 489 | H37460 | 15589 Lambda-PRL2 Arabidopsis thaliana cDNA clone 181N17T7, mRNA sequence. | Arabidopsis thaliana | 45,869 | 30-DEC-1997 |
| rxa02715 | 513 | GB_GSS13: AQ454067 | 534 | AQ454067 | HS_5176_B1_A09_T7A RPCI-11 Human Male BAC Library | Homo sapiens | 40,854 | 21-Apr-99 |
| | | | | | Homo sapiens genomic clone Plate = 752 Col = 17 Row = B, genomic | | | |
| | | | | | survey sequence. | | | |
| | | GB_PR3: AC005495 | 185254 | AC005495 | Homo sapiens chromosome 17, clone hRPK.293_K_20, complete sequence. | Homo sapiens | 33,200 | 30-OCT-1998 |
| | | GB_PR3: AC005495 | 185254 | AC005495 | Homo sapiens chromosome 17, clone hRPK.293_K_20, complete sequence. | Homo sapiens | 36,273 | 30-OCT-1998 |
| rxa02720 | 825 | GB_BA1: AB003132 | 4116 | AB003132 | Corynebacterium glutamicum gene for MurC, FtsQ, FtsZ, complete cds. | Corynebacterium | 98,788 | 4-Aug-97 |
| | | | | | | glutamicum | | |
| | | GB_BA1: BLFTSZ | 5546 | Y08964 | B. lactofermentum murC, ftsQ or divD & ftsZ genes. | Corynebacterium | 100,000 | 08-OCT-1998 |
| | | | | | | glutamicum | | |
| | | GB_HTG4: AC009764 | 213581 | AC009764 | Homo sapiens chromosome 11 clone 381_O_22 map 11, *** SEQUENCING | Homo sapiens | 35,504 | 21-OCT-1999 |
| | | | | | IN PROGRESS ***, 40 unordered pieces. | | | |
| rxa02721 | 861 | GB_BA1: BLFTSZ | 5546 | Y08964 | B. lactofermentum murC, ftsQ or divD & ftsZ genes. | Corynebacterium | 98,606 | 08-OCT-1998 |
| | | | | | | glutamicum | | |
| | | GB_BA1: AB003132 | 4116 | AB003132 | Corynebacterium glutamicum gene for MurC, FtsQ, FtsZ, complete cds. | Corynebacterium | 97,561 | 4-Aug-97 |
| | | | | | | glutamicum | | |
| | | GB_BA1: SCI51 | 40745 | AL109848 | Streptomyces coelicolor cosmid I51. | Streptomyces coelicolor | 39,110 | 16-Aug-99 |
| | | | | | | A3(2) | | |
| rxa02725 | 735 | GB_BA1: CGU43535 | 2531 | U43535 | Corynebacterium glutamicum multidrug resistance protein (cmr) gene, complete cds. | Corynebacterium | 42,043 | 9-Apr-97 |
| | | | | | | glutamicum | | |
| | | GB_EST1: D40448 | 361 | D40448 | RICS2437A Rice shoot Oryza sativa cDNA, mRNA sequence. | Oryza sativa | 41,944 | 11-Nov-94 |
| | | GB_BA2: AF038430 | 8330 | AF038430 | Thiobacillus neapolitanus carboxysome operon, complete sequence. | Thiobacillus neapolitanus | 39,202 | 21-Aug-98 |
| rxa02727 | 1035 | GB_BA1: MTCY270 | 37586 | Z95388 | Mycobacterium tuberculosis H37Rv complete genome; segment 96/162. | Mycobacterium | 37,427 | 10-Feb-99 |
| | | | | | | tuberculosis | | |
| | | GB_BA1: MTAG84 | 1458 | X77129 | M. tuberculosis Ag84 (CIE) gene. | Mycobacterium | 49,339 | 21-Jul-95 |
| | | | | | | tuberculosis | | |
| | | GB_BA1: AP000064 | 247695 | AP000064 | Aeropyrum pernix genomic DNA, section 7/7. | Aeropyrum pernix | 38,790 | 22-Jun-99 |
| rxa02735 | 828 | GB_BA1: TVCPT | 1923 | X56901 | T. vulgaris cpT gene for carboxypeptidase T. | Thermoactinomyces | 37,688 | 30-OCT-1991 |
| | | | | | | vulgaris | | |
| | | GB_GSS4: AQ682162 | 355 | AQ682162 | HS_5503_B2_C11_SP6E RPCI-11 Human Male BAC Library | Homo sapiens | 35,294 | 28-Jun-99 |
| | | | | | Homo sapiens genomic clone Plate = 1079 Col = 22 Row = F, genomic | | | |
| | | | | | survey sequence. | | | |
| | | GB_EST21: AA915356 | 456 | AA915356 | vz29a08.r1 Soares 2NbMT Mus musculus cDNA clone IMAGE: | Mus musculus | 42,609 | 14-Apr-98 |
| | | | | | 1327862 5′, mRNA sequence. | | | |
| rxa02736 | 1080 | GB_PAT: E13655 | 2260 | E13655 | gDNA encoding glucose-6-phosphate dehydrogenase. | Corynebacterium | 99,620 | 24-Jun-98 |
| | | | | | | glutamicum | | |
| | | GB_GSS13: AQ447106 | 711 | AQ447106 | mgxb0004P18f CUGI Rice Blast BAC Library Magnaporthe grisea | Magnaporthe grisea | 38,158 | 8-Apr-99 |
| | | | | | genomic clone mgxb0004P18f, genomic survey sequence. | | | |
| | | GB_EST36: AI900850 | 670 | AI900850 | sb95c03.y1 Gm-c1012 Glycine max cDNA clone GENOME SYSTEMS CLONE ID: | Glycine max | 37,479 | 06-DEC-1999 |
| | | | | | Gm-c1012-413 5′ similar to SW: IF4Z_TOBAC Q40468 EUKARYOTIC | | | |
| | | | | | INITIATION FACTOR 4A-15;, mRNA sequence. | | | |
| rxa02744 | 927 | GB_PR1: AB026898 | 270000 | AB026898 | Homo sapiens DNA, DLEC1 to ORCTL4 gene region, section 1/2 | Homo sapiens | 39,364 | 15-MAY-1999 |
| | | | | | (DLEC1, ORCTL3, ORCTL4 genes, complete cds). | | | |
| | | GB_PR1: AB026898 | 270000 | AB026898 | Homo sapiens DNA, DLEC1 to ORCTL4 gene region, | Homo sapiens | 36,275 | 15-MAY-1999 |
| | | | | | section 1/2 (DLEC1, ORCTL3, ORCTL4 genes, complete cds). | | | |
| | | GB_PR2: AP000498 | 100000 | AP000498 | Homo sapiens genomic DNA, chromosome 3p21.3, clone: 603 to 320, | Homo sapiens | 39,364 | 28-Sep-99 |
| | | | | | anti-oncogene region, section 1/3. | | | |
| rxa02751 | 597 | GB_HTG4: AC010127 | 189552 | AC010127 | Homo sapiens chromosome unknown clone NH0002I08, WORKING | Homo sapiens | 36,149 | 29-OCT-1999 |
| | | | | | DRAFT SEQUENCE, in unordered pieces. | | | |
| | | GB_HTG4: AC010127 | 189552 | AC010127 | Homo sapiens chromosome unknown clone NH0002I08, WORKING | Homo sapiens | 36,149 | 29-OCT-1999 |
| | | | | | DRAFT SEQUENCE, in unordered pieces. | | | |
| | | GB_HTG4: AC010127 | 189552 | AC010127 | Homo sapiens chromosome unknown clone NH0002I08, WORKING | Homo sapiens | 35,924 | 29-OCT-1999 |
| | | | | | DRAFT SEQUENCE, in unordered pieces. | | | |
| rxa02756 | 1014 | GB_RO: CRUGIPR | 2785 | D38103 | Hamster mRNA for GIP (gastric inhibitory polypeptide) receptor, complete cds. | Cricetulus sp. | 38,501 | 8-Feb-99 |
| | | GB_HTG1: CNS01DRV | 224372 | AL118558 | Homo sapiens chromosome 14 clone R-1017G21, *** SEQUENCING | Homo sapiens | 38,667 | 15-OCT-1999 |
| | | | | | IN PROGRESS ***, in unordered pieces. | | | |
| | | GB_HTG1: CNS01DRV | 224372 | AL118558 | Homo sapiens chromosome 14 clone R-1017G21, *** SEQUENCING | Homo sapiens | 38,667 | 15-OCT-1999 |
| | | | | | IN PROGRESS ***, in unordered pieces. | | | |
| rxa02757 | 669 | GB_RO: RNU35245 | 2051 | U35245 | Rat vacuolar protein sorting homolog r-vps33b mRNA, complete cds. | Rattus norvegicus | 39,058 | 15-Jan-97 |
| | | GB_RO: RNU35245 | 2051 | U35245 | Rat vacuolar protein sorting homolog r-vps33b mRNA, complete cds. | Rattus norvegicus | 37,481 | 15-Jan-97 |
| rxa02765 | 882 | GB_EST4: H46883 | 459 | H46883 | yo19f06.r1 Soares adult brain N2b5HB55Y Homo sapiens cDNA clone | Homo sapiens | 40,132 | 31-Jul-95 |
| | | | | | IMAGE: 178403 5′, mRNA sequence. | | | |
| | | GB_PL1: NTA6235 | 3931 | AJ006235 | Nicotiana tabacum DNA fragment for K-alpha right T-DNA border. | Nicotiana tabacum | 34,247 | 6-Feb-99 |
| | | GB_HTG3: AC011519 | 57287 | AC011519 | Homo sapiens chromosome 19 clone LLNL-F_192H5, | Homo sapiens | 38,497 | 07-OCT-1999 |
| | | | | | *** SEQUENCING IN PROGRESS ***, 36 unordered pieces. | | | |
| rxa02766 | 516 | GB_GSS13: AQ489419 | 554 | AQ489419 | RPCI-11-246A3.TV RPCI-11 Homo sapiens genomic clone | Homo sapiens | 37,821 | 24-Apr-99 |
| | | | | | RPCI-11-246A3, genomic survey sequence. | | | |
| | | GB_PR3: HS90L6 | 190837 | Z97353 | Human DNA sequence from clone 90L6 on chromosome 22q11.21-11.23. | Homo sapiens | 38,160 | 23-Nov-99 |
| | | | | | Contains an RPL15 (60S Ribosomal Protein L15) pseudogene, ESTs, | | | |
| | | | | | STSs and GSSs, complete sequence. | | | |
| | | GB_BA1: MTCY373 | 35516 | Z73419 | Mycobacterium tuberculosis H37Rv complete genome; segment 57/162. | Mycobacterium | 36,701 | 17-Jun-98 |
| | | | | | | tuberculosis | | |
| rxa02770 | 1689 | GB_BA2: AF038651 | 4077 | AF038651 | Corynebacterium glutamicum dipeptide-binding protein (dciAE) | Corynebacterium | 100,000 | 14-Sep-98 |
| | | | | | gene, partial cds; adenine phosphoribosyltransferase (apt) and GTP pyrophosphokinase | glutamicum | | |
| | | | | | (rel) genes, complete cds; and unknown gene. | | | |
| | | GB_OV: AF061275 | 6756 | AF061275 | Ictalurus punctatus estrogen receptor type alpha mRNA, complete cds. | Ictalurus punctatus | 37,117 | 31-OCT-1998 |
| | | GB_RO: MMSCSELN4 | 3840 | X61756 | M. musculus rearranged T-cell receptor beta variable region (Vb17a). | Mus musculus | 37,933 | 03-DEC-1991 |
| rxa02774 | 494 | GB_HTG2: AF129408 | 138685 | AF129408 | Homo sapiens chromosome 21 clone PAC 31K18 map 21q22.3, | Homo sapiens | 38,241 | 04-MAR-1999 |
| | | | | | *** SEQUENCING IN PROGRESS ***, in unordered pieces. | | | |
| | | GB_HTG2: AF129408 | 138685 | AF129408 | Homo sapiens chromosome 21 clone PAC 31K18 map 21q22.3, | Homo sapiens | 38,241 | 04-MAR-1999 |
| | | | | | *** SEQUENCING IN PROGRESS ***, in unordered pieces. | | | |
| | | GB_PR3: AF064859 | 122571 | AF064859 | Homo sapiens chromosome 21q22.3 PAC 141B3, complete sequence, | Homo sapiens | 37,910 | 2-Jun-98 |
| | | | | | containing ribosomal protein homologue pseudogene L23a. | | | |
| rxa02775 | 348 | GB_PR3: HSU19F10 | 31474 | Z81145 | Human DNA sequence from cosmid U19F10, between | Homo sapiens | 36,443 | 23-Nov-99 |
| | | | | | markers DXS366 and DXS87 on chromosome X contains ESTs. | | | |
| | | GB_EST11: AA211850 | 293 | AA211850 | zr90e04.s1 NCI_CGAP_GCB1 Homo sapiens cDNA clone IMAGE: 682974 | Homo sapiens | 30,479 | 13-Aug-97 |
| | | | | | 3′ similar to TR: G1224065 G1224065 MER37 TRANSPOSABLE | | | |
| | | | | | ELEMENT, COMPLETE CONSENSUS SEQUENCE.;, mRNA sequence. | | | |
| | | GB_EST13: AA372532 | 400 | AA372532 | EST84441 Colon adenocarcinoma IV Homo sapiens cDNA 5′ end, mRNA sequence. | Homo sapiens | 40,104 | 21-Apr-97 |
| rxa02776 | 465 | GB_GSS9: AQ096114 | 383 | AQ096114 | HS_3030_A2_D11_MF CIT Approved Human Genomic Sperm Library D | Homo sapiens | 44,643 | 27-Aug-98 |
| | | | | | Homo sapiens genomic clone Plate = 3030 Col = 22 Row = G, genomic | | | |
| | | | | | survey sequence. | | | |
| | | GB_RO: AF139518 | 8827 | AF139518 | Rattus norvegicus A-kinase anchor protein mRNA, complete cds. | Rattus norvegicus | 39,722 | 16-Jun-99 |
| | | GB_EST32: AI728295 | 564 | AI728295 | BNLGHi10386 Six-day Cotton fiber Gossypium hirsutum cDNA 5′ | Gossypium hirsutum | 37,049 | 11-Jun-99 |
| | | | | | similar to (AF076274) contains similarity to rat p47 protein (GB: AB002086) | | | |
| | | | | | [Arabidopsis thaliana], mRNA sequence. | | | |
| rxa02777 | 1230 | GB_HTG3: AC009407 | 207973 | AC009407 | Homo sapiens clone NH0223I10, *** SEQUENCING IN | Homo sapiens | 39,784 | 21-Aug-99 |
| | | | | | PROGRESS ***, 16 unordered pieces. | | | |
| | | GB_HTG3: AC009407 | 207973 | AC009407 | Homo sapiens clone NH0223I10, *** SEQUENCING IN | Homo sapiens | 39,784 | 21-Aug-99 |
| | | | | | PROGRESS ***, 16 unordered pieces. | | | |
| | | GB_BA2: AE001137 | 44380 | AE001137 | Borrelia burgdorferi (section 23 of 70) of the complete genome. | Borrelia burgdorferi | 39,105 | 15-DEC-1997 |
| rxa02778 | 348 | GB_EST37: AI940900 | 668 | AI940900 | sb79d08.y1 Gm-c1010 Glycine max cDNA clone GENOME SYSTEMS CLONE | Glycine max | 35,036 | 3-Aug-99 |
| | | | | | ID: Gm-c1010-1192 5′ similar to SW: ITRA_SOYBN P01070 | | | |
| | | | | | TRYPSIN INHIBITORS A AND C PRECURSOR;, mRNA sequence. | | | |
| | | GB_HTG4: AC008940 | 131864 | AC008940 | Homo sapiens chromosome 5 clone CITB-H1_2319M24, *** SEQUENCING | Homo sapiens | 33,043 | 31-OCT-1999 |
| | | | | | IN PROGRESS ***, 3 ordered pieces. | | | |
| | | GB_HTG4: AC008940 | 131864 | AC008940 | Homo sapiens chromosome 5 clone CITB-H1_2319M24, *** SEQUENCING | Homo sapiens | 33,043 | 31-OCT-1999 |
| | | | | | IN PROGRESS ***, 3 ordered pieces. | | | |
| rxa02779 | 402 | GB_PR1: AB020876 | 100000 | AB020876 | Homo sapiens genomic DNA of 9q32 anti-oncogene of flat | Homo sapiens | 35,000 | 21-MAY-1999 |
| | | | | | epitherium cancer, segment 8/10. | | | |
| | | GB_EST26: AI339126 | 415 | AI339126 | qt06d03.x1 NCI_CGAP_GC4 Homo sapiens cDNA clone IMAGE: 1946789 3′ | Homo sapiens | 35,876 | 29-DEC-1998 |
| | | | | | similar to gb: L25444 60S RIBOSOMAL PROTEIN L35A (HUMAN);, | | | |
| | | | | | mRNA sequence. | | | |
| | | GB_PR1: AB020876 | 100000 | AB020876 | Homo sapiens genomic DNA of 9q32 anti-oncogene of flat epitherium | Homo sapiens | 35,678 | 21-MAY-1999 |
| | | | | | cancer, segment 8/10. | | | |
| rxa02780 | 450 | GB_GSS14: AQ524732 | 591 | AQ524732 | HS_5236_A1_D09_SP6E RPCI-11 Human Male BAC Library Homo sapiens | Homo sapiens | 39,726 | 11-MAY-1999 |
| | | | | | genomic clone Plate = 812 Col = 17 Row = G, genomic survey sequence. | | | |
| | | GB_PR4: AC006051 | 38903 | AC006051 | Homo sapiens 12p13.3 PAC RPCI5-1103G8 (Roswell Park Cancer Institute | Homo sapiens | 35,068 | 26-Nov-98 |
| | | | | | Human PAC Library) complete sequence. | | | |
| | | GB_PR4: AC006051 | 38903 | AC006051 | Homo sapiens 12p13.3 PAC RPCI5-1103G8 (Roswell Park Cancer Institute | Homo sapiens | 37,273 | 26-Nov-98 |
| | | | | | Human PAC Library) complete sequence. | | | |
| rxa02781 | 1314 | GB_VI: BHV1CGEN | 135301 | AJ004801 | Bovine herpesvirus 1 complete genome. | Bovine herpesvirus type | 41,053 | 11-Jan-99 |
| | | | | | | 1.1 | | |
| | | GB_BA1: SHGCPIR | 107379 | X86780 | S. hygroscopicus gene cluster for polyketide immunosuppressant rapamycin. | Streptomyces | 40,551 | 16-Aug-96 |
| | | | | | | hygroscopicus | | |
| | | GB_BA1: SHGCPIR | 107379 | X86780 | S. hygroscopicus gene cluster for polyketide immunosuppressant rapamycin. | Streptomyces | 39,598 | 16-Aug-96 |
| | | | | | | hygroscopicus | | |
| rxa02782 | 1422 | GB_IN1: DSV28T23 | 5218 | X60176 | D. silvestris clone U28T2 non-LTR retrotransposon DNA (5218 bp). | Drosophila silvestris | 38,695 | 25-MAR-1992 |
| | | GB_IN1: DSV28T24 | 7779 | X60177 | D. silvestris clone U28T2 non-LTR retrotransposon DNA (7779 bp). | Drosophila silvestris | 38,844 | 30-Nov-93 |
| | | GB_BA2: MPU34795 | 24888 | U34795 | Mycoplasma pneumoniae cosmid pcosMPGT9 25 kb EcoRI fragment. | Mycoplasma pneumoniae | 37,832 | 06-MAR-1996 |
| rxa02783 | 672 | GB_EST2: R13483 | 481 | R13483 | yf77g03.r1 Soares infant brain 1NIB Homo sapiens cDNA clone IMAGE: | Homo sapiens | 36,243 | 12-Apr-95 |
| | | | | | 28494 5′, mRNA sequence. | | | |
| | | GB_HTG3: AC011333 | 159160 | AC011333 | Homo sapiens chromosome 5 clone CIT-HSPC_229L21, *** SEQUENCING | Homo sapiens | 38,246 | 06-OCT-1999 |
| | | | | | IN PROGRESS ***, 23 unordered pieces. | | | |
| | | GB_HTG3: AC011333 | 159160 | AC011333 | Homo sapiens chromosome 5 clone CIT-HSPC_229L21, *** SEQUENCING | Homo sapiens | 38,246 | 06-OCT-1999 |
| | | | | | IN PROGRESS ***, 23 unordered pieces. | | | |
| rxa02784 | 309 | GB_PR3: HS474A14 | 107352 | AL023285 | Human DNA sequence from clone 474A14 on chromosome 1q24.1-25.2 Contains | Homo sapiens | 37,868 | 23-Nov-99 |
| | | | | | EST, CA repeat, 5′UTR (tenascin-R), GSS, complete sequence. | | | |
| | | GB_GSS12: AQ374565 | 441 | AQ374565 | RPCI11-159P12.TV RPCI-11 Homo sapiens genomic clone RPCI-11-159P12, | Homo sapiens | 36,522 | 20-MAY-1999 |
| | | | | | genomic survey sequence. | | | |
| | | GB_GSS5: AQ780184 | 686 | AQ780184 | HS_3138_B1_F11_MR CIT Approved Human Genomic Sperm Library D | Homo sapiens | 44,186 | 2-Aug-99 |
| | | | | | Homo sapiens genomic clone Plate = 3138 Col = 21 Row = L, genomic | | | |
| | | | | | survey sequence. | | | |
| rxa02786 | 830 | GB_PL1: SCYBL033C | 1794 | Z35794 | S. cerevisiae chromosome II reading frame ORF YBL033c. | Saccharomyces cerevisiae | 39,264 | 11-MAR-1998 |
| | | GB_PL1: ECRIB1GN | 1747 | Z21617 | S. cerevisiae RIB1 gene encoding GTP cyclohydrolase II. | Saccharomyces cerevisiae | 37,118 | 28-Jan-95 |
| | | GB_PAT: A38763 | 1747 | A38763 | Sequence 1 from Patent WO9411515. | Saccharomyces cerevisiae | 37,118 | 05-MAR-1997 |
| rxa02789 | 669 | GB_EST34: AV146372 | 295 | AV146372 | AV146372 Mus musculus C57BL/6J 10-11 day embryo Mus musculus | Mus musculus | 65,432 | 3-Jul-99 |
| | | | | | cDNA clone 2810453K19, mRNA sequence. | | | |
| | | GB_GSS5: AQ785226 | 524 | AQ785226 | HS_2025_B2_A07_T7C CIT Approved Human Genomic Sperm Library D | Homo sapiens | 40,342 | 3-Aug-99 |
| | | | | | Homo sapiens genomic clone Plate = 2025 Col = 14 Row = B, genomic survey | | | |
| | | | | | sequence. | | | |
| | | GB_BA1: SCE94 | 38532 | AL049628 | Streptomyces coelicolor cosmid E94. | Streptomyces coelicolor | 35,346 | 12-Apr-99 |
| rxa02793 | 825 | GB_HTG2: AC006514 | 247029 | AC006514 | Homo sapiens clone RPCI11-656E20, *** SEQUENCING IN PROGRESS ***, | Homo sapiens | 33,742 | 1-Apr-99 |
| | | | | | 90 unordered pieces. | | | |
| | | GB_HTG2: AC006514 | 247029 | AC006514 | Homo sapiens clone RPCI11-656E20, *** SEQUENCING IN PROGRESS ***, | Homo sapiens | 33,742 | 1-Apr-99 |
| | | | | | 90 unordered pieces. | | | |
| | | GB_EST22: AI033150 | 384 | AI033150 | ow94b01.s1 Soares_fetal_liver_spleen_1NFLS_S1 Homo sapiens cDNA clone | Homo sapiens | 38,951 | 28-Aug-98 |
| | | | | | IMAGE: 1654441 3′ similar to TR: O02711 O02711 PRO-POL-DUTPASE | | | |
| | | | | | POLYPROTEIN;, mRNA sequence. | | | |
| rxa02796 | 672 | GB_OV: AF172144 | 1101 | AF172144 | Xenopus laevis potassium channel beta 2 subunit mRNA, partial cds. | Xenopus laevis | 40,000 | 25-Sep-99 |
| | | GB_HTG1: AP000572 | 84439 | AP000572 | Homo sapiens chromosome 11 clone P28D2 map 11q13, *** SEQUENCING | Homo sapiens | 35,725 | 09-OCT-1999 |
| | | | | | IN PROGRESS ***, in unordered pieces. | | | |
| | | GB_HTG1: AP000572 | 84439 | AP000572 | Homo sapiens chromosome 11 clone P28D2 map 11q13, *** SEQUENCING | Homo sapiens | 35,725 | 09-OCT-1999 |
| | | | | | IN PROGRESS ***, in unordered pieces. | | | |
| rxa02798 | 1548 | GB_EST10: AA155097 | 322 | AA155097 | mr24h12.r1 Soares mouse 3NbMS Mus musculus cDNA clone IMAGE: | Mus musculus | 41,195 | 16-Feb-97 |
| | | | | | 598439 5′, mRNA sequence. | | | |
| | | GB_GSS9: AQ150317 | 489 | AQ150317 | HS_3178_B1_F12_T7 CIT Approved Human Genomic Sperm Library D | Homo sapiens | 39,549 | 08-OCT-1998 |
| | | | | | Homo sapiens genomic clone Plate = 3178 Col = 23 Row = L, | | | |
| | | | | | genomic survey sequence. | | | |
| | | GB_BA2: AE001731 | 10186 | AE001731 | Thermotoga maritima section 43 of 136 of the complete genome. | Thermotoga maritima | 35,747 | 2-Jun-99 |
| rxa02799 | 396 | GB_IN2: AF139876 | 1562 | AF139876 | Giardia intestinalis histone H4 gene, complete cds. | Giardia intestinalis | 34,848 | 02-OCT-1999 |
| | | GB_HTG5: AC011614 | 176606 | AC011614 | Drosophila melanogaster chromosome X clone BACR48L05 (D1142) RPCI-98 | Drosophila melanogaster | 38,817 | 19-Nov-99 |
| | | | | | 48.L.5 map 16F-17A strain y; cn bw sp, *** SEQUENCING IN | | | |
| | | | | | PROGRESS ***, 114 unordered pieces. | | | |
| | | GB_GSS10: AQ254726 | 565 | AQ254726 | EP(3)3517 Drosophila melanogaster EP line Drosophila melanogaster genomic | Drosophila melanogaster | 38,798 | 28-Jun-99 |
| | | | | | Sequence recovered from Both 5′ and 3′ ends of P element, genomic survey sequence. | | | |
| rxa02812 | | | | | | | | |
| rxa02815 | 552 | GB_BA2: PAU32853 | 1961 | U32853 | Pseudomonas aeruginosa mucC and mucD genes, complete cds. | Pseudomonas aeruginosa | 39,925 | 06-MAR-1996 |
| | | GB_BA2: PAU49151 | 4587 | U49151 | Pseudomonas aeruginosa alternate sigma factor (algU), mucA, mucB, | Pseudomonas aeruginosa | 39,925 | 13-MAR-1996 |
| | | | | | mucC and mucD genes, complete cds. | | | |
| | | GB_BA2: PAU49151 | 4587 | U49151 | Pseudomonas aeruginosa alternate sigma factor (algU), mucA, mucB, | Pseudomonas aeruginosa | 35,922 | 13-MAR-1996 |
| | | | | | mucC and mucD genes, complete cds. | | | |
| rxa02817 | 499 | GB_BA1: CORAIA | 4705 | L09232 | Corynebacterium glutamicum acetohydroxy acid synthase (ilvB) and (ilvN) | Corynebacterium | 38,554 | 23-Feb-95 |
| | | | | | genes, and acetohydroxy acid isomeroreductase (ilvC) gene, complete cds. | glutamicum | | |
| | | GB_EST22: AI004214 | 475 | AI004214 | ot94h01.x1 Soares_total_fetus_Nb2HF8_9w Homo sapiens cDNA clone | Homo sapiens | 51,092 | 27-Aug-98 |
| | | | | | IMAGE: 1624465 3′, mRNA sequence. | | | |
| | | GB_EST27: AI457904 | 455 | AI457904 | tj48b08.x1 Soares_NSF_F8_9W_OT_PA_P_S1 Homo sapiens cDNA | Homo sapiens | 37,381 | 13-Apr-99 |
| | | | | | clone IMAGE: 2144727 3′, mRNA sequence. | | | |
| rxa02818 | 606 | GB_PL1: MZEADH1CM | 6167 | M32984 | Z. mays alcohol dehydrogenase (ADH-1 C-m allele) gene, complete cds. | Zea mays | 33,111 | 27-Apr-93 |
| | | GB_PL1: ZMADH1ALL | 6158 | X17556 | Z. mays DNA for Adh1-Cm allele. | Zea mays | 33,111 | 23-Jan-92 |
| | | GB_PL1: MZEADH1CM | 6167 | M32984 | Z. mays alcohol dehydrogenase (ADH-1 C-m allele) gene, complete cds. | Zea mays | 38,065 | 27-Apr-93 |
| rxa02823 | 370 | GB_PL2: AF077130 | 4392 | AF077130 | Oryza sativa receptor-like protein kinase gene, complete cds. | Oryza sativa | 33,243 | 25-Jul-98 |
| | | GB_HTG1: CNS00M8S | 214599 | AL079302 | Homo sapiens chromosome 14 clone R-1089B7, *** SEQUENCING IN | Homo sapiens | 38,420 | 15-OCT-1999 |
| | | | | | PROGRESS ***, in ordered pieces. | | | |
| | | GB_HTG1: CNS00M8S | 214599 | AL079302 | Homo sapiens chromosome 14 clone R-1089B7, *** SEQUENCING IN | Homo sapiens | 38,420 | 15-OCT-1999 |
| | | | | | PROGRESS ***, in ordered pieces. | | | |
| rxa02825 | 1962 | GB_PL1: ZMU17350 | 1289 | U17350 | Zea mays thiamine biosynthetic enzyme (thi1-1) mRNA, complete cds. | Zea mays | 40,710 | 12-Apr-96 |
| | | GB_GSS13: AQ440082 | 432 | AQ440082 | HS_5080_B1_B12_SP6E RPCI-11 Human Male BAC Library Homo sapiens | Homo sapiens | 41,121 | 31-MAR-1999 |
| | | | | | genomic clone Plate = 656 Col = 23 Row = D, genomic survey sequence. | | | |
| | | GB_EST10: AA141278 | 579 | AA141278 | CK01542.3prime CK Drosophila melanogaster embryo BlueScript | Drosophila melanogaster | 42,424 | 29-Nov-98 |
| | | | | | Drosophila melanogaster cDNA clone CK01542 3prime, mRNA sequence. | | | |
| rxa02827 | 523 | GB_BA2: AF054624 | 6984 | AF054624 | Lactobacillus sakei transcription-repair coupling factor (mfd) gene, | Lactobacillus sakel | 37,241 | 12-Jan-99 |
| | | | | | partial cds; L-lactate dehydrogenase (ldhL) gene, complete cds; and unknown | | | |
| | | | | | genes. | | | |
| | | GB_BA2: AF023181 | 6616 | AF023181 | Listeria monocytogenes transcription-repair coupling factor (mfdL), low | Listeria monocytogenes | 61,228 | 1-Jan-99 |
| | | | | | temperature requirement B protein (ltrB), and DiviC homolog (divL) genes, | | | |
| | | | | | complete cds. | | | |
| | | GB_HTG3: AC009213 | 114735 | AC009213 | Drosophila melanogaster chromosome 3 clone BACR09F18 (D812) | Drosophila melanogaster | 32,427 | 23-Aug-99 |
| | | | | | RPCI-98 09.F.18 map 98D-98D strain y; cn bw sp, *** SEQUENCING | | | |
| | | | | | IN PROGRESS ***, 109 unordered pieces. | | | |
| rxa02838 | 528 | GB_BA2: AE000069 | 12230 | AE000069 | Rhizobium sp. NGR234 plasmid pNGR234a, section 6 of 46 of the complete | Rhizobium sp. NGR234 | 57,803 | 12-DEC-1997 |
| | | | | | plasmid sequence. | | | |
| | | GB_OM: SSU19994 | 2004 | U19994 | Sus scrofa p55 TNF receptor mRNA, complete cds. | Sus scrofa | 34,848 | 30-Jan-96 |
| | | GB_BA2: AE000069 | 12230 | AE000069 | Rhizobium sp. NGR234 plasmid pNGR234a, section 6 of 46 of the | Rhizobium sp. NGR234 | 36,505 | 12-DEC-1997 |
| | | | | | complete plasmid sequence. | | | |
| rxa02840 | 273 | GB_BA2: ECU73857 | 128824 | U73857 | Escherichia coli chromosome minutes 6-8. | Escherichia coli | 100,000 | 14-Jul-99 |
| | | GB_BA2: AE000145 | 11448 | AE000145 | Escherichia coli K-12 MG1655 section 35 of 400 of the complete genome. | Escherichia coli | 100,000 | 12-Nov-98 |
| | | GB_BA1: ECORFABC | 3044 | X76979 | E. coli orf302, 0rf303 and orf101 sequence. | Escherichia coli | 40,672 | 28-Aug-96 |
| rxa02841 | 558 | GB_GSS4: AQ724171 | 407 | AQ724171 | HS_5380_B1_H09_SP6E RPCI-11 Human Male BAC Library Homo sapiens | Homo sapiens | 35,135 | 14-Jul-99 |
| | | | | | genomic clone Plate = 956 Col = 17 Row = P, genomic survey sequence. | | | |
| | | GB_PL1: PSFERR | 1023 | X64417 | P. sativum mRNA for ferritin. | Pisum sativum | 41,985 | 30-Jun-93 |
| | | GB_PL1: PSFERRI | 1023 | X73369 | P. sativum mRNA for ferritin. | Pisum sativum | 41,985 | 21-Jul-95 |
| rxa02842 | 365 | GB_EST32: AI723928 | 435 | AI723928 | RHIZ1_35_B10.y1_A001 Rhizome1 Sorghum halepense cDNA, mRNA sequence. | Sorghum halepense | 32,616 | 11-Jun-99 |
| | | GB_PR2: HS212A2 | 212753 | Z95114 | Human DNA sequence from clone 212A2 on chromosome 22q12 Contains gene | Homo sapiens | 38,279 | 23-Nov-99 |
| | | | | | for TNF-inducible protein CG12-1, 3′ end of a gene similar to | | | |
| | | | | | apolipoprotein L, ESTs, STSs, CA repeat, GSSs and CpG islands, | | | |
| | | | | | complete sequence. | | | |
| | | GB_OV: AF116856 | 4634 | AF116856 | Gallus gallus neurocan core protein precursor, mRNA, complete cds. | Gallus gallus | 41,176 | 20-MAY-1999 |
| rxa02845 | 615 | GB_PR3: AC005934 | 43699 | AC005934 | Homo sapiens chromosome 19, cosmid R30813, complete sequence. | Homo sapiens | 35,225 | 5-Nov-98 |
| | | GB_PR3: AC005340 | 36705 | AC005340 | Homo sapiens chromosome 19, cosmid F19544, complete sequence. | Homo sapiens | 35,225 | 30-Jul-98 |
| | | GB_PR3: AC005934 | 43699 | AC005934 | Homo sapiens chromosome 19, cosmid R30813, complete sequence. | Homo sapiens | 39,153 | 5-Nov-98 |
| rxa02846 | 873 | GB_GSS5: AQ749564 | 838 | AQ749564 | HS_5575_A1_B11_SP6 RPCI-11 Human Male BAC Library Homo sapiens | Homo sapiens | 36,286 | 19-Jul-99 |
| | | | | | genomic clone Plate = 1151 Col = 21 Row = C, genomic survey sequence. | | | |
| | | GB_GSS5: AQ749564 | 838 | AQ749564 | HS_5575_A1_B11_SP6 RPCI-11 Human Male BAC Library Homo sapiens | Homo sapiens | 38,591 | 19-Jul-99 |
| | | | | | genomic clone Plate = 1151 Col = 21 Row = C, genomic survey sequence. | | | |
| rxa02847 | 1135 | GB_BA1: MSGB13GS | 42923 | L78823 | Mycobacterium leprae cosmid B13 DNA sequence. | Mycobacterium leprae | 47,559 | 15-Jun-96 |
| | | GB_HTG4: AC009557 | 128590 | AC009557 | Homo sapiens chromosome 15 clone 76_D_16 map 15, | Homo sapiens | 36,289 | 25-OCT-1999 |
| | | | | | LOW-PASS SEQUENCE SAMPLING. | | | |
| | | GB_HTG4: AC009557 | 128590 | AC009557 | Homo sapiens chromosome 15 clone 76_D_16 map 15, | Homo sapiens | 36,289 | 25-OCT-1999 |
| | | | | | LOW-PASS SEQUENCE SAMPLING. | | | |
| rxa02848 | 499 | GB_BA1: AB018531 | 4961 | AB018531 | Corynebacterium glutamicum dtsR1 and dtsR2 genes, complete cds. | Corynebacterium | 98,397 | 19-OCT-1998 |
| | | | | | | glutamicum | | |
| | | GB_PAT: E17019 | 4961 | E17019 | Brevibacterium lactofermentum dtsR and dtsR2 genes. | Corynebacterium | 98,397 | 28-Jul-99 |
| | | | | | | glutamicum | | |
| | | GB_OM: CFU08596 | 1780 | U08596 | Canis familiaris delayed rectifier K+ channel mRNA, partial cds. | Canis familiaris | 43,265 | 21-DEC-1994 |
| rxa02849 | 305 | GB_VI: AF121950 | 9395 | AF121950 | Hepatitis G virus strain lowan, complete genome. | Hepatitis G virus | 33,110 | 24-MAY-1999 |
| | | GB_PAT: AR049304 | 9327 | AR049304 | Sequence 234 from patent U.S. Pat. No. 5824507. | Unknown. | 31,803 | 29-Sep-99 |
| | | GB_PAT: AR026878 | 9327 | AR026878 | Sequence 234 from patent U.S. Pat. No. 5856134. | Unknown. | 31,803 | 29-Sep-99 |

[0169] TABLE 3
Corynebacterium and Brevibacterium Strains Which May be Used in the Practice of the Invention

| Genus | species | ATCC | FERM | NRRL | CECT | NCIMB | CBS | NCTC | DSMZ |
|---|---|---|---|---|---|---|---|---|---|
| Brevibacterium | ammoniagenes | 21054 | | | | | | | |
| Brevibacterium | ammoniagenes | 19350 | | | | | | | |
| Brevibacterium | ammoniagenes | 19351 | | | | | | | |
| Brevibacterium | ammoniagenes | 19352 | | | | | | | |
| Brevibacterium | ammoniagenes | 19353 | | | | | | | |
| Brevibacterium | ammoniagenes | 19354 | | | | | | | |
| Brevibacterium | ammoniagenes | 19355 | | | | | | | |
| Brevibacterium | ammoniagenes | 19356 | | | | | | | |
| Brevibacterium | ammoniagenes | 21055 | | | | | | | |
| Brevibacterium | ammoniagenes | 21077 | | | | | | | |
| Brevibacterium | ammoniagenes | 21553 | | | | | | | |
| Brevibacterium | ammoniagenes | 21580 | | | | | | | |
| Brevibacterium | ammoniagenes | 39101 | | | | | | | |
| Brevibacterium | butanicum | 21196 | | | | | | | |
| Brevibacterium | divaricatum | 21792 | P928 | | | | | | |
| Brevibacterium | flavum | 21474 | | | | | | | |
| Brevibacterium | flavum | 21129 | | | | | | | |
| Brevibacterium | flavum | 21518 | | | | | | | |
| Brevibacterium | flavum | | | B11474 | | | | | |
| Brevibacterium | flavum | | | B11472 | | | | | |
| Brevibacterium | flavum | 21127 | | | | | | | |
| Brevibacterium | flavum | 21128 | | | | | | | |
| Brevibacterium | flavum | 21427 | | | | | | | |
| Brevibacterium | flavum | 21475 | | | | | | | |
| Brevibacterium | flavum | 21517 | | | | | | | |
| Brevibacterium | flavum | 21528 | | | | | | | |
| Brevibacterium | flavum | 21529 | | | | | | | |
| Brevibacterium | flavum | | | B11477 | | | | | |
| Brevibacterium | flavum | | | B11478 | | | | | |
| Brevibacterium | flavum | 21127 | | | | | | | |
| Brevibacterium | flavum | | | B11474 | | | | | |
| Brevibacterium | healii | 15527 | | | | | | | |
| Brevibacterium | ketoglutamicum | 21004 | | | | | | | |
| Brevibacterium | ketoglutamicum | 21089 | | | | | | | |
| Brevibacterium | ketosoreductum | 21914 | | | | | | | |
| Brevibacterium | lactofermentum | | | | 70 | | | | |
| Brevibacterium | lactofermentum | | | | 74 | | | | |
| Brevibacterium | lactofermentum | | | | 77 | | | | |
| Brevibacterium | lactofermentum | 21798 | | | | | | | |
| Brevibacterium | lactofermentum | 21799 | | | | | | | |
| Brevibacterium | lactofermentum | 21800 | | | | | | | |
| Brevibacterium | lactofermentum | 21801 | | | | | | | |
| Brevibacterium | lactofermentum | | | B11470 | | | | | |
| Brevibacterium | lactofermentum | | | B11471 | | | | | |
| Brevibacterium | lactofermentum | 21086 | | | | | | | |
| Brevibacterium | lactofermentum | 21420 | | | | | | | |
| Brevibacterium | lactofermentum | 21086 | | | | | | | |
| Brevibacterium | lactofermentum | 31269 | | | | | | | |
| Brevibacterium | linens | 9174 | | | | | | | |
| Brevibacterium | linens | 19391 | | | | | | | |
| Brevibacterium | linens | 8377 | | | | | | | |
| Brevibacterium | paraffinolyticum | | | | | 11160 | | | |
| Brevibacterium | spec. | | | | | | 717.73 | | |
| Brevibacterium | spec. | | | | | | 717.73 | | |
| Brevibacterium | spec. | 14604 | | | | | | | |
| Brevibacterium | spec. | 21860 | | | | | | | |
| Brevibacterium | spec. | 21864 | | | | | | | |
| Brevibacterium | spec. | 21865 | | | | | | | |
| Brevibacterium | spec. | 21866 | | | | | | | |
| Brevibacterium | spec. | 19240 | | | | | | | |
| Corynebacterium | acetoacidophilum | 21476 | | | | | | | |
| Corynebacterium | acetoacidophilum | 13870 | | | | | | | |
| Corynebacterium | acetoglutamicum | | | B11473 | | | | | |
| Corynebacterium | acetoglutamicum | | | B11475 | | | | | |
| Corynebacterium | acetoglutamicum | 15806 | | | | | | | |
| Corynebacterium | acetoglutamicum | 21491 | | | | | | | |
| Corynebacterium | acetoglutamicum | 31270 | | | | | | | |
| Corynebacterium | acetophilum | | | B3671 | | | | | |
| Corynebacterium | ammoniagenes | 6872 | | | | | | 2399 | |
| Corynebacterium | ammoniagenes | 15511 | | | | | | | |
| Corynebacterium | fujiokense | 21496 | | | | | | | |
| Corynebacterium | glutamicum | 14067 | | | | | | | |
| Corynebacterium | glutamicum | 39137 | | | | | | | |
| Corynebacterium | glutamicum | 21254 | | | | | | | |
| Corynebacterium | glutamicum | 21255 | | | | | | | |
| Corynebacterium | glutamicum | 31830 | | | | | | | |
| Corynebacterium | glutamicum | 13032 | | | | | | | |
| Corynebacterium | glutamicum | 14305 | | | | | | | |
| Corynebacterium | glutamicum | 15455 | | | | | | | |
| Corynebacterium | glutamicum | 13058 | | | | | | | |
| Corynebacterium | glutamicum | 13059 | | | | | | | |
| Corynebacterium | glutamicum | 13060 | | | | | | | |
| Corynebacterium | glutamicum | 21492 | | | | | | | |
| Corynebacterium | glutamicum | 21513 | | | | | | | |
| Corynebacterium | glutamicum | 21526 | | | | | | | |
| Corynebacterium | glutamicum | 21543 | | | | | | | |
| Corynebacterium | glutamicum | 13287 | | | | | | | |
| Corynebacterium | glutamicum | 21851 | | | | | | | |
| Corynebacterium | glutamicum | 21253 | | | | | | | |
| Corynebacterium | glutamicum | 21514 | | | | | | | |
| Corynebacterium | glutamicum | 21516 | | | | | | | |
| Corynebacterium | glutamicum | 21299 | | | | | | | |
| Corynebacterium | glutamicum | 21300 | | | | | | | |
| Corynebacterium | glutamicum | 39684 | | | | | | | |
| Corynebacterium | glutamicum | 21488 | | | | | | | |
| Corynebacterium | glutamicum | 21649 | | | | | | | |
| Corynebacterium | glutamicum | 21650 | | | | | | | |
| Corynebacterium | glutamicum | 19223 | | | | | | | |
| Corynebacterium | glutamicum | 13869 | | | | | | | |
| Corynebacterium | glutamicum | 21157 | | | | | | | |
| Corynebacterium | glutamicum | 21158 | | | | | | | |
| Corynebacterium | glutamicum | 21159 | | | | | | | |
| Corynebacterium | glutamicum | 21355 | | | | | | | |
| Corynebacterium | glutamicum | 31808 | | | | | | | |
| Corynebacterium | glutamicum | 21674 | | | | | | | |
| Corynebacterium | glutamicum | 21562 | | | | | | | |
| Corynebacterium | glutamicum | 21563 | | | | | | | |
| Corynebacterium | glutamicum | 21564 | | | | | | | |
| Corynebacterium | glutamicum | 21565 | | | | | | | |
| Corynebacterium | glutamicum | 21566 | | | | | | | |
| Corynebacterium | glutamicum | 21567 | | | | | | | |
| Corynebacterium | glutamicum | 21568 | | | | | | | |
| Corynebacterium | glutamicum | 21569 | | | | | | | |
| Corynebacterium | glutamicum | 21570 | | | | | | | |
| Corynebacterium | glutamicum | 21571 | | | | | | | |
| Corynebacterium | glutamicum | 21572 | | | | | | | |
| Corynebacterium | glutamicum | 21573 | | | | | | | |
| Corynebacterium | glutamicum | 21579 | | | | | | | |
| Corynebacterium | glutamicum | 19049 | | | | | | | |
| Corynebacterium | glutamicum | 19050 | | | | | | | |
| Corynebacterium | glutamicum | 19051 | | | | | | | |
| Corynebacterium | glutamicum | 19052 | | | | | | | |
| Corynebacterium | glutamicum | 19053 | | | | | | | |
| Corynebacterium | glutamicum | 19054 | | | | | | | |
| Corynebacterium | glutamicum | 19055 | | | | | | | |
| Corynebacterium | glutamicum | 19056 | | | | | | | |
| Corynebacterium | glutamicum | 19057 | | | | | | | |
| Corynebacterium | glutamicum | 19058 | | | | | | | |
| Corynebacterium | glutamicum | 19059 | | | | | | | |
| Corynebacterium | glutamicum | 19060 | | | | | | | |
| Corynebacterium | glutamicum | 19185 | | | | | | | |
| Corynebacterium | glutamicum | 13286 | | | | | | | |
| Corynebacterium | glutamicum | 21515 | | | | | | | |
| Corynebacterium | glutamicum | 21527 | | | | | | | |
| Corynebacterium | glutamicum | 21544 | | | | | | | |
| Corynebacterium | glutamicum | 21492 | | | | | | | |
| Corynebacterium | glutamicum | | | B8183 | | | | | |
| Corynebacterium | glutamicum | | | B8182 | | | | | |
| Corynebacterium | glutamicum | | | B12416 | | | | | |
| Corynebacterium | glutamicum | | | B12417 | | | | | |
| Corynebacterium | glutamicum | | | B12418 | | | | | |
| Corynebacterium | glutamicum | | | B11476 | | | | | |
| Corynebacterium | glutamicum | 21608 | | | | | | | |
| Corynebacterium | lilium | | P973 | | | | | | |
| Corynebacterium | nitrilophilus | 21419 | | | | 11594 | | | |
| Corynebacterium | spec. | | P4445 | | | | | | |
| Corynebacterium | spec. | | P4446 | | | | | | |
| Corynebacterium | spec. | 31088 | | | | | | | |
| Corynebacterium | spec. | 31089 | | | | | | | |
| Corynebacterium | spec. | 31090 | | | | | | | |
| Corynebacterium | spec. | 31090 | | | | | | | |
| Corynebacterium | spec. | 31090 | | | | | | | |
| Corynebacterium | spec. | 15954 | | | | | | | 20145 |
| Corynebacterium | spec. | 21857 | | | | | | | |
| Corynebacterium | spec. | 21862 | | | | | | | |
| Corynebacterium | spec. | 21863 | | | | | | | |

ATCC: American Type Culture Collection, Rockville, MD, USA
FERM: Fermentation Research Institute, Chiba, Japan
NRRL: ARS Culture Collection, Northern Regional Research Laboratory, Peoria, IL, USA
CECT: Coleccion Espanola de Cultivos Tipo, Valencia, Spain
NCIMB: National Collection of Industrial and Marine Bacteria Ltd., Aberdeen, UK
CBS: Centraalbureau voor Schimmelcultures, Baarn, NL
NCTC: National Collection of Type Cultures, London, UK
DSMZ: Deutsche Sammlung von Mikroorganismen und Zellkulturen, Braunschweig, Germany
For reference see Sugawara, H. et al. (1993) World directory of collections of cultures of microorganisms: Bacteria, fungi and yeasts (4^{th} edn), World federation for culture collections world data center on microorganisms, Saimata, Japen.

[0170] TABLE 2
GENES IDENTIFIED FROM GENBANK

| GenBank ™ | | | |
|---|---|---|---|
| Accession No. | Gene Name | Gene Function | Reference |
| A09073 | ppg | Phosphoenol pyruvate carboxylase | Bachmann, B. et al. “DNA fragment coding for phosphoenolpyruvat |
| | | | corboxylase, recombinant DNA carrying said fragment, strains carrying the |
| | | | recombinant DNA and method for producing L-aminino acids using said |
| | | | strains,” Patent: EP 0358940-A 3 Mar. 21, 1990 |
| A45579, | | Threonine dehydratase | Moeckel, B. et al. “Production of L-isoleucine by means of recombinant |
| A45581, | | | micro-organisms with deregulated threonine dehydratase,” Patent: WO 9519442-A 5 Jul. 20, |
| A45583, | | | 1995 |
| A45585 | | | |
| A45587 | | | |
| AB003132 | murC; ftsQ; ftsZ | | Kobayashi, M. et al. “Cloning, sequencing, and characterization of the ftsZ |
| | | | gene from coryneform bacteria,” Biochem. Biophys. Res. Commun., |
| | | | 236(2): 383-388 (1997) |
| AB015023 | murC; ftsQ | | Wachi, M. et al. “A murC gene from Coryneform bacteria,” Appl. Microbiol. |
| | | | Biotechnol., 51(2): 223-228 (1999) |
| AB018530 | dtsR | | Kimura, E. et al. “Molecular cloning of a novel gene, dtsR, which rescues the detergent sensitivity of |
| | | | a mutant derived from Brevibacterium |
| | | | lactofermentum,” Biosci. Biotechnol. Biochem., 60(10): 1565-1570 (1996) |
| AB018531 | dtsR1; dtsR2 | | |
| AB020624 | murI | D-glutamate racemase | |
| AB023377 | tkt | transketolase | |
| AB024708 | gltB; gltD | Glutamine 2-oxoglutarate aminotransferase | |
| | | large and small subunits | |
| AB025424 | acn | aconitase | |
| AB027714 | rep | Replication protein | |
| AB027715 | rep; aad | Replication protein; aminoglycoside | |
| | | adenyltransferase | |
| AF005242 | argC | N-acetylglutamate-5-semialdehyde | |
| | | dehydrogenase | |
| AF005635 | glnA | Glutamine synthetase | |
| AF030405 | hisF | cyclase | |
| AF030520 | argG | Argininosuccinate synthetase | |
| AF031518 | argF | Ornithine carbamolytransferase | |
| AF036932 | aroD | 3-dehydroquinate dehydratase | |
| AF038548 | pyc | Pyruvate carboxylase | |
| AF038651 | dciAE; apt; rel | Dipeptide-binding protein; adenine | Wehmeier, L. et al. “The role of the Corynebacterium glutamicum rel gene in |
| | | phosphoribosyltransferase; GTP | (p)ppGpp metabolism,” Microbiology, 144: 1853-1862 (1998) |
| | | pyrophosphokinase | |
| AF041436 | argR | Arginine repressor | |
| AF045998 | impA | Inositol monophosphate phosphatase | |
| AF048764 | argH | Argininosuccinate lyase | |
| AF049897 | argC; argJ; argB; | N-acetylglutamylphosphate reductase; | |
| | argD; argF; argR; | ornithine acetyltransferase; N- | |
| | argG; argH | acetylglutamate kinase; acetylornithine | |
| | | transminase; ornithine | |
| | | carbamoyltransferase; arginine repressor; | |
| | | argininosuccinate synthase; | |
| | | argininosuccinate lyase | |
| AF050109 | inhA | Enoyl-acyl carrier protein reductase | |
| AF050166 | hisG | ATP phosphoribosyltransferase | |
| AF051846 | hisA | Phosphoribosylformimino-5-amino-1- | |
| | | phosphoribosyl-4-imidazolecarboxamide | |
| | | isomerase | |
| AF052652 | metA | Homoserine O-acetyltransferase | Park, S. et al. “Isolation and analysis of metA, a methionine biosynthetic gene |
| | | | encoding homoserine acetyltransferase in Corynebacterium glutamicum,” Mol. |
| | | | Cells., 8(3): 286-294 (1998) |
| AF053071 | aroB | Dehydroquinate synthetase | |
| AF060558 | hisH | Glutamine amidotransferase | |
| AF086704 | hisE | Phosphoribosyl-ATP- | |
| | | pyrophosphohydrolase | |
| AF114233 | aroA | 5-enolpyruvylshikimate 3-phosphate | |
| | | synthase | |
| AF116184 | panD | L-aspartate-alpha-decarboxylase precursor | Dusch, N. et al. “Expression of the Corynebacterium glutamicum panD gene |
| | | | encoding L-aspartate-alpha-decarboxylase leads to pantothenate |
| | | | overproduction in Escherichia coli,” Appl. Environ. Microbiol., 65(4)1530-1539 (1999) |
| AF124518 | aroD; aroE | 3-dehydroquinase; shikimate | |
| | | dehydrogenase | |
| AF124600 | aroC; aroK; aroB; | Chorismate synthase; shikimate kinase; 3- | |
| | pepQ | dehydroquinate synthase; putative | |
| | | cytoplasmic peptidase | |
| AF145897 | inhA | | |
| AF145898 | inhA | | |
| AJ001436 | ectP | Transport of ectoine, glycine betaine, | Peter, H. et al. “Corynebacterium glutamicum is equipped with four secondary |
| | | proline | carriers for compatible solutes: Identification, sequencing, and characterization |
| | | | of the proline/ectoine uptake system, ProP, and the ectoine/proline/glycine |
| | | | betaine carrier, EctP,” J. Bacteriol., 180(22): 6005-6012 (1998) |
| AJ004934 | dapD | Tetrahydrodipicolinate succinylase | Wehrmann, A. et al. “Different modes of diaminopimelate synthesis and their |
| | | (incomplete¹) | role in cell wall integrity: A study with Corynebacterium glutamicum,” J. Bacteriol., 180(12): |
| | | | 3159-3165 (1998) |
| AJ007732 | ppc; secG; amt; ocd; | Phosphoenolpyruvate-carboxylase; ?; high | |
| | soxA | affinity ammonium uptake protein; putative | |
| | | ornithine-cyclodecarboxylase; sarcosine | |
| | | oxidase | |
| AJ010319 | ftsY, glnB, glnD; srp; | Involved in cell division; PII protein; | Jakoby, M. et al. “Nitrogen regulation in Corynebacterium glutamicum; |
| | amtP | uridylyltransferase (uridylyl-removing | Isolation of genes involved in biochemical characterization of corresponding |
| | | enzmye); signal recognition particle; low | proteins,” FEMS Microbiol., 173(2): 303-310 (1999) |
| | | affinity ammonium uptake protein | |
| AJ132968 | cat | Chloramphenicol aceteyl transferase | |
| AJ224946 | mqo | L-malate: quinone oxidoreductase | Molenaar, D. et al. “Biochemical and genetic characterization of the |
| | | | membrane-associated malate dehydrogenase (acceptor) from Corynebacterium |
| | | | glutamicum,” Eur. J. Biochem., 254(2): 395-403 (1998) |
| AJ238250 | ndh | NADH dehydrogenase | |
| AJ238703 | porA | Porin | Lichtinger, T. et al. “Biochemical and biophysical characterization of the cell |
| | | | wall porin of Corynebacterium glutamicum: The channel is formed by a low |
| | | | molecular mass polypeptide,” Biochemistry, 37(43): 15024-15032 (1998) |
| D17429 | | Transposable element IS31831 | Vertes, A. A. et al. “Isolation and characterization of IS31831, a transposable |
| | | | element from Corynebacterium glutamicum,” Mol. Microbiol., 11(4): 739-746 |
| | | | (1994) |
| D84102 | odhA | 2-oxoglutarate dehydrogenase | Usuda, Y. et al. “Molecular cloning of the Corynebacterium glutamicum |
| | | | (Brevibacterium lactofermentum AJ12036) odhA gene encoding a novel type |
| | | | of 2-oxoglutarate dehydrogenase,” Microbiology, 142: 3347-3354 (1996) |
| E01358 | hdh; hk | Homoserine dehydrogenase; homoserine | Katsumata, R. et al. “Production of L-thereonine and L-isoleucine,” Patent: JP 1987232392-A 1 Oct. |
| | | kinase | 12, 1987 |
| E01359 | | Upstream of the start codon of homoserine | Katsumata, R. et al. “Production of L-thereonine and L-isoleucine,” Patent: JP |
| | | kinase gene | 1987232392-A 2 Oct. 12, 1987 |
| E01375 | | Tryptophan operon | |
| E01376 | trpL; trpE | Leader peptide; anthranilate synthase | Matsui, K. et al. “Tryptophan operon, peptide and protein coded thereby, |
| | | | utilization of tryptophan operon gene expression and production of |
| | | | tryptophan,” Patent: JP 1987244382-A 1 Oct. 24, 1987 |
| E01377 | | Promoter and operator regions of | Matsui, K. et al. “Tryptophan operon, peptide and protein coded thereby, |
| | | tryptophan operon | utilization of tryptophan operon gene expression and production of |
| | | | tryptophan,” Patent: JP 1987244382-A 1 Oct. 24, 1987 |
| E03937 | | Biotin-synthase | Hatakeyama, K. et al. “DNA fragment containing gene capable of coding |
| | | | biotin synthetase and its utilization,” Patent: JP 1992278088-A 1 Oct. 02, 1992 |
| E04040 | | Diamino pelargonic acid aminotransferase | Kohama, K. et al. “Gene coding diaminopelargonic acid aminotransferase and |
| | | | desthiobiotin synthetase and its utilization,” Patent: JP 1992330284-A 1 |
| | | | Nov. 18, 1992 |
| E04041 | | Desthiobiotinsynthetase | Kohama, K. et al. “Gene coding diaminopelargonic acid aminotransferase and |
| | | | desthiobiotin synthetase and its utilization,” Patent: JP 1992330284-A 1 |
| | | | Nov. 18, 1992 |
| E04307 | | Flavum aspartase | Kurusu, Y. et al. “Gene DNA coding aspartase and utilization thereof,” Patent: JP 1993030977-A 1 |
| | | | Feb. 09, 1993 |
| E04376 | | Isocitric acid lyase | Katsumata, R. et al. “Gene manifestation controlling DNA,” Patent: JP |
| | | | 1993056782-A 3 Mar. 09, 1993 |
| E04377 | | Isocitric acid lyase N-terminal fragment | Katsumata, R. et al. “Gene manifestation controlling DNA,” Patent: JP |
| | | | 1993056782-A 3 Mar. 09, 1993 |
| E04484 | | Prephenate dehydratase | Sotouchi, N. et al. “Production of L-phenylalanine by fermentation,” Patent: JP |
| | | | 1993076352-A 2 Mar. 30, 1993 |
| E05108 | | Aspartokinase | Fugono, N. et al. “Gene DNA coding Aspartokinase and its use,” Patent: JP |
| | | | 1993184366-A 1 Jul. 27, 1993 |
| E05112 | | Dihydro-dipichorinate synthetase | Hatakeyama, K. et al. “Gene DNA coding dihydrodipicolinic acid synthetase |
| | | | and its use,” Patent: JP 1993184371-A 1 Jul. 27, 1993 |
| E05776 | | Diaminopimelic acid dehydrogenase | Kobayashi, M. et al. “Gene DNA coding Diaminopimelic acid dehydrogenase |
| | | | and its use,” Patent: JP 1993284970-A 1 Nov. 02, 1993 |
| E05779 | | Threonine synthase | Kohama, K. et al. “Gene DNA coding threonine synthase and its use,” Patent: |
| | | | JP 1993284972-A 1 Nov. 02, 1993 |
| E06110 | | Prephenate dehydratase | Kikuchi, T. et al. “Production of L-phenylalanine by fermentation method,” |
| | | | Patent: JP 1993344881-A 1 Dec. 27, 1993 |
| E06111 | | Mutated Prephenate dehydratase | Kikuchi, T. et al. “Production of L-phenylalanine by fermentation method,” |
| | | | Patent: JP 1993344881-A 1 Dec. 27, 1993 |
| E06146 | | Acetohydroxy acid synthetase | Inui, M. et al. “Gene capable of coding Acetohydroxy acid synthetase and its |
| | | | use,” Patent: JP 1993344893-A 1 Dec. 27, 1993 |
| E06825 | | Aspartokinase | Sugimoto, M. et al. “Mutant aspartokinase gene,” patent: JP 1994062866-A 1 Mar. 08, 1994 |
| E06826 | | Mutated aspartokinase alpha subunit | Sugimoto, M. et al. “Mutant aspartokinase gene,” patent: JP 1994062866-A 1 |
| | | | Mar. 08, 1994 |
| E06827 | | Mutated aspartokinase alpha subunit | Sugimoto, M. et al. “Mutant aspartokinase gene,” patent: JP 1994062866-A 1 |
| | | | Mar. 08, 1994 |
| E07701 | secY | | Honno, N. et al. “Gene DNA participating in integration of membraneous |
| | | | protein to membrane,” Patent: JP 1994169780-A 1 Jun. 21, 1994 |
| E08177 | | Aspartokinase | Sato, Y. et al. “Genetic DNA capable of coding Aspartokinase released from |
| | | | feedback inhibition and its utilization,” Patent: JP 1994261766-A 1 Sep. 20, 1994 |
| E08178, | | Feedback inhibition-released Aspartokinase | Sato, Y. et al. “Genetic DNA capable of coding Aspartokinase released from |
| E08179, | | | feedback inhibition and its utilization,” Patent: JP 1994261766-A 1 Sep. 20, 1994 |
| E08180, | | | |
| E08181, | | | |
| E08182 | | | |
| E08232 | | Acetohydroxy-acid isomeroreductase | Inui, M. et al. “Gene DNA coding acetohydroxy acid isomeroreductase,” |
| | | | Patent: JP 1994277067-A 1 Oct. 04, 1994 |
| E08234 | secE | | Asai, Y. et al. “Gene DNA coding for translocation machinery of protein,” |
| | | | Patent: JP 1994277073-A 1 Oct. 04, 1994 |
| E08643 | | FT aminotransferase and desthiobiotin | Hatakeyama, K. et al. “DNA fragment having promoter function in |
| | | synthetase promoter region | coryneform bacterium,” Patent: JP 1995031476-A 1 Feb. 03, 1995 |
| E08646 | | Biotin synthetase | Hatakeyama, K. et al. “DNA fragment having promoter function in |
| | | | coryneform bacterium,” Patent: JP 1995031476-A 1 Feb. 03, 1995 |
| E08649 | | Aspartase | Kohama, K. et al “DNA fragment having promoter function in coryneform |
| | | | bacterium,” Patent: JP 1995031478-A 1 Feb. 03, 1995 |
| E08900 | | Dihydrodipicolinate reductase | Madori, M. et al. “DNA fragment containing gene coding Dihydrodipicolinate |
| | | | acid reductase and utilization thereof,” Patent: JP 1995075578-A 1 Mar. 20, 1995 |
| E08901 | | Diaminopimelic acid decarboxylase | Madori, M. et al. “DNA fragment containing gene coding Diaminopimelic acid |
| | | | decarboxylase and utilization thereof,” Patent: JP 1995075579-A 1 Mar. 20, 1995 |
| E12594 | | Serine hydroxymethyltransferase | Hatakeyama, K. et al. “Production of L-trypophan,” Patent: JP 1997028391-A 1 Feb. 04, 1997 |
| E12760, | | transposase | Moriya, M. et al. “Amplification of gene using artificial transposon,” Patent: |
| E12759, | | | JP 1997070291-A Mar. 18, 1997 |
| E12758 | | | |
| E12764 | | Arginyl-tRNA synthetase; diaminopimelic | Moriya, M. et al. “Amplification of gene using artificial transposon,” Patent: |
| | | acid decarboxylase | JP 1997070291-A Mar. 18, 1997 |
| E12767 | | Dihydrodipicolinic acid synthetase | Moriya, M. et al. “Amplification of gene using artificial transposon,” Patent: |
| | | | JP 1997070291-A Mar. 18, 1997 |
| E12770 | | aspartokinase | Moriya, M. et al. “Amplification of gene using artificial transposon,” Patent: JP 1997070291-A Mar. 18, |
| | | | 1997 |
| E12773 | | Dihydrodipicolinic acid reductase | Moriya, M. et al. “Amplification of gene using artificial transposon,” Patent: |
| | | | JP 1997070291-A Mar. 18, 1997 |
| E13655 | | Glucose-6-phosphate dehydrogenase | Hatakeyama, K. et al. “Glucose-6-phosphate dehydrogenase and DNA capable |
| | | | of coding the same,” Patent: JP 1997224661-A 1 Sep. 02, 1997 |
| L01508 | IlvA | Threonine dehydratase | Moeckel, B. et al. “Functional and structural analysis of the threonine |
| | | | dehydratase of Corynebacterium glutamicum,” J. Bacteriol., 174: 8065-8072 |
| | | | (1992) |
| L07603 | EC 4.2.1.15 | 3-deoxy-D-arabinoheptulosonate-7- | Chen, C. et al. “The cloning and nucleotide sequence of Corynebacterium |
| | | phosphate synthase | glutamicum 3-deoxy-D-arabinoheptulosonate-7-phosphate synthase gene,” FEMS Microbiol. Lett., 107: 223-230 |
| | | | (1993) |
| L09232 | IlvB; ilvN; ilvC | Acetohydroxy acid synthase large subunit; | Keilhauer, C. et al. “Isoleucine synthesis in Corynebacterium glutamicum: |
| | | Acetohydroxy acid synthase small subunit; | molecular analysis of the ilvB-ilvN-ilvC operon,” J. Bacteriol., 175(17): 5595-5603 |
| | | Acetohydroxy acid isomeroreductase | (1993) |
| L18874 | PtsM | Phosphoenolpyruvate sugar | Fouet, A et al. “Bacillus subtilis sucrose-specific enzyme II of the |
| | | phosphotransferase | phosphotransferase system: expression in Escherichia coli and homology to |
| | | | enzymes II from enteric bacteria,” PNAS USA, 84(24): 8773-8777 (1987); Lee, J. K. |
| | | | et al. “Nucleotide sequence of the gene encoding the Corynebacterium |
| | | | glutamicum mannose enzyme II and analyses of the deduced protein |
| | | | sequence,” FEMS Microbiol. Lett., 119(1-2): 137-145 (1994) |
| L27123 | aceB | Malate synthase | Lee, H-S. et al. “Molecular characterization of aceB, a gene encoding malate |
| | | | synthase in Corynebacterium glutamicum,” J. Microbiol. Biotechnol., |
| | | | 4(4): 256-263 (1994) |
| L27126 | | Pyruvate kinase | Jetten, M. S. et al. “Structural and functional analysis of pyruvate kinase from |
| | | | Corynebacterium glutamicum,” Appl. Environ. Microbiol., 60(7): 2501-2507 |
| | | | (1994) |
| L28760 | aceA | Isocitrate lyase | |
| L35906 | dtxr | Diphtheria toxin repressor | Oguiza, J. A. et al. “Molecular cloning, DNA sequence analysis, and |
| | | | characterization of the Corynebacterium diphtheriae dtxR from Brevibacterium lactofermentum,” J. Bacteriol., |
| | | | 177(2): 465-467 (1995) |
| M13774 | | Prephenate dehydratase | Follettie, M. T. et al. “Molecular cloning and nucleotide sequence of the |
| | | | Corynebacterium glutamicum pheA gene,” J. Bacteriol., 167: 695-702 (1986) |
| M16175 | 5S rRNA | | Park, Y-H. et al. “Phylogenetic analysis of the coryneform bacteria by 56 rRNA sequences,” J. Bacteriol., |
| | | | 169: 1801-1806 (1987) |
| M16663 | trpE | Anthranilate synthase, 5′ end | Sano, K. et al. “Structure and function of the trp operon control regions of |
| | | | Brevibacterium lactofermentum, a glutamic-acid-producing bacterium,” Gene, |
| | | | 52: 191-200 (1987) |
| M16664 | trpA | Tryptophan synthase, 3′end | Sano, K. et al. “Structure and function of the trp operon control regions of |
| | | | Brevibacterium lactofermentum, a glutamic-acid-producing bacterium,” Gene, |
| | | | 52: 191-200 (1987) |
| M25819 | | Phosphoenolpyruvate carboxylase | O'Regan, M. et al. “Cloning and nucleotide sequence of the |
| | | | Phosphoenolpyruvate carboxylase-coding gene of Corynebacterium |
| | | | glutamicum ATCC13032,” Gene, 77(2): 237-251 (1989) |
| M85106 | | 23S rRNA gene insertion sequence | Roller, C. et al. “Gram-positive bacteria with a high DNA G + C content are |
| | | | characterized by a common insertion within their 23S rRNA genes,” J. Gen. Microbiol., 138: 1167-1175 |
| | | | (1992) |
| M85107, | | 23S rRNA gene insertion sequence | Roller, C. et al. “Gram-positive bacteria with a high DNA G + C content are |
| M85108 | | | characterized by a common insertion within their 23S rRNA genes,” J. Gen. |
| | | | Microbiol., 138: 1167-1175 (1992) |
| M89931 | aecD; brnQ; yhbw | Beta C-S lyase; branched-chain amino acid | Rossol, I. et al. “The Corynebacterium glutamicum aecD gene encodes a C-S |
| | | uptake carrier; hypothetical protein yhbw | lyase with alpha, beta-elimination activity that degrades aminoethylcysteine,” |
| | | | J. Bacteriol., 174(9): 2968-2977 (1992); Tauch, A. et al. “Isoleucine uptake in |
| | | | Corynebacterium glutamicum ATCC 13032 is directed by the brnQ gene |
| | | | product,” Arch. Microbiol., 169(4): 303-312 (1998) |
| S59299 | trp | Leader gene (promoter) | Herry, D. M. et al. “Cloning of the trp gene cluster from a tryptophan- |
| | | | hyperproducing strain of Corynebacterium glutamicum; identification of a |
| | | | mutation in the trp leader sequence,” Appl. Environ. Microbiol., 59(3): 791-799 |
| | | | (1993) |
| U11545 | trpD | Anthranilate phosphoribosyltransferase | O'Gara, J. P. and Dunican, L. K. (1994) Complete nucleotide sequence of the |
| | | | Corynebacterium glutamicum ATCC 21850 tpD gene.” Thesis, Microbiology Department, University |
| | | | College Galway, Ireland. |
| U13922 | cglIM; cglIR; clgIIR | Putative type II 5-cytosoine | Schafer, A. et al. “Cloning and characterization of a DNA region encoding a |
| | | methyltransferase; putative type II | stress-sensitive restriction system from Corynebacterium glutamicum ATCC |
| | | restriction endonuclease; putative type I or | 13032 and analysis of its role in intergeneric conjugation with Escherichia |
| | | type III restriction endonuclease | coli,” J. Bacteriol., 176(23): 7309-7319 (1994); Schafer, A. et al. “The |
| | | | Corynebacterium glutamicum cglIM gene encoding a 5-cytosine in an McrBC- |
| | | | deficient Escherichia coli strain,” Gene, 203(2): 95-101 (1997) |
| U14965 | recA | | |
| U31224 | ppx | | Ankri, S. et al. “Mutations in the Corynebacterium glutamicumproline |
| | | | biosynthetic pathway: A natural bypass of the proA step,” J. Bacteriol., 178(15): 4412-4419 |
| | | | (1996) |
| U31225 | proC | L-proline: NADP+ 5-oxidoreductase | Ankri, S. et al. “Mutations in the Corynebacterium glutamicumproline |
| | | | biosynthetic pathway: A natural bypass of the proA step,” J. Bacteriol., |
| | | | 178(15): 4412-4419 (1996) |
| U31230 | obg; proB; unkdh | ?; gamma glutamyl kinase; similar to D- | Ankri, S. et al. “Mutations in the Corynebacterium glutamicumproline |
| | | isomer specific 2-hydroxyacid | biosynthetic pathway: A natural bypass of the proA step,” J. Bacteriol., |
| | | dehydrogenases | 178(15): 4412-4419 (1996) |
| U31281 | bioB | Biotin synthase | Serebriiskii, I. G., “Two new members of the bio B superfamily: Cloning, |
| | | | sequencing and expression of bio B genes of Methylobacillus flagellatum and |
| | | | Corynebacterium glutamicum,” Gene, 175: 15-22 (1996) |
| U35023 | thtR; accBC | Thiosulfate sulfurtransferase; acyl CoA | Jager, W. et al. “A Corynebacterium glutamicum gene encoding a two-domain |
| | | carboxylase | protein similar to biotin carboxylases and biotin-carboxyl-carrier proteins,” Arch. Microbiol., |
| | | | 166(2); 76-82 (1996) |
| U43535 | cmr | Multidrug resistance protein | Jager, W. et al. “A Corynebacterium glutamicum gene conferring multidrug |
| | | | resistance in the heterologous host Escherichia coli,” J. Bacteriol., |
| | | | 179(7): 2449-2451 (1997) |
| U43536 | clpB | Heat shock ATP-binding protein | |
| U53587 | aphA-3 | 3′5″-aminoglycoside phosphotransferase | |
| U89648 | | Corynebacterium glutamicum unidentified | |
| | | sequence involved in histidine biosynthesis, | |
| | | partial sequence | |
| X04960 | trpA; trpB; trpC; trpD; | Tryptophan operon | Matsui, K. et al. “Complete nucleotide and deduced amino acid sequences of |
| | trpE; trpG; trpL | | the Brevibacterium lactofermentum tryptophan operon,” Nucleic Acids Res., |
| | | | 14(24): 10113-10114 (1986) |
| X07563 | lys A | DAP decarboxylase (meso-diaminopimelate | Yeh, P. et al. “Nucleic sequence of the lysA gene of Corynebacterium |
| | | decarboxylase, EC 4.1.1.20) | glutamicum and possible mechanisms for modulation of its expression,” Mol. |
| | | | Gen. Genet., 212(1): 112-119 (1988) |
| X14234 | EC 4.1.1.31 | Phosphoenolpyruvate carboxylase | Eikmanns, B. J. et al. “The Phosphoenolpyruvate carboxylase gene of |
| | | | Corynebacterium glutamicum: Molecular cloning, nucleotide sequence, and |
| | | | expression,” Mol. Gen. Genet., 218(2): 330-339 (1989); Lepiniec, L. et al. |
| | | | “Sorghum Phosphoenolpyruvate carboxylase gene family: structure, function |
| | | | and molecular evolution,” Plant. Mol. Biol., 21 (3): 487-502 (1993) |
| X17313 | fda | Fructose-bisphosphate aldolase | Von der Osten, C. H. et al. “Molecular cloning, nucleotide sequence and fine- |
| | | | structural analysis of the Corynebacterium glutamicum fda gene: structural |
| | | | comparison of C. glutamicum fructose-1,6-biphosphate aldolase to class I and |
| | | | class II aldolases,” Mol. Microbiol., |
| X53993 | dapA | L-2, 3-dihydrodipicolinate synthetase (EC | Bonnassie, S. et al. “Nucleic sequence of the dapA gene from |
| | | 4.2.1.52) | Corynebacterium glutamicum,” Nucleic Acids Res., 18(21): 6421 (1990) |
| X54223 | | AttB-related site | Cianciotto, N. et al. “DNA sequence homology between att B-related sites of |
| | | | Corynebacterium diphtheriae, Corynebacterium ulcerans, Corynebacterium |
| | | | glutamicum, and the attP site of lambdacorynephage,” FEMS. Microbiol, Lett., 66: 299-302 |
| | | | (1990) |
| X54740 | argS; lysA | Arginyl-tRNA synthetase; Diaminopimelate | Marcel, T. et al. “Nucleotide sequence and organization of the upstream region |
| | | decarboxylase | of the Corynebacterium glutamicum lysA gene,” Mol. Microbiol., 4(11): 1819-1830 |
| | | | (1990) |
| X55994 | trpL; trpE | Putative leader peptide; anthranilate | Heery, D. M. et al. “Nucleotide sequence of the Corynebacterium glutamicum |
| | | synthase component 1 | trpE gene,” Nucleic Acids Res., 18(23): 7138 (1990) |
| X56037 | thrC | Threonine synthase | Han, K. S. et al. “The molecular structure of the Corynebacterium glutamicum |
| | | | threonine synthase gene,” Mol. Microbiol., 4(10): 1693-1702 (1990) |
| X56075 | attB-related site | Attachment site | Cianciotto, N. et al. “DNA sequence homology between att B-related sites of |
| | | | Corynebacterium diphtheriae, Corynebacterium ulcerans, Corynebacterium |
| | | | glutamicum, and the attP site of lambdacorynephage,” FEMS. Microbiol, |
| | | | Lett., 66: 299-302 (1990) |
| X57226 | lysC-alpha; lysC-beta; | Aspartokinase-alpha subunit; | Kalinowski, J. et al. “Genetic and biochemical analysis of the Aspartokinase |
| | asd | Aspartokinase-beta subunit; aspartate beta | from Corynebacterium glutamicum,” Mol. Microbiol., 5(5): 1197-1204 (1991); |
| | | semialdehyde dehydrogenase | Kalinowski, J. et al. “Aspartokinase genes lysC alpha and lysC beta overlap |
| | | | and are adjacent to the aspertate beta-semialdehyde dehydrogenase gene asd in |
| | | | Corynebacterium glutamicum,” Mol. Gen. Genet., 224(3): 317-324 (1990) |
| X59403 | gap; pgk; tpi | Glyceraldehyde-3-phosphate; | Eikmanns, B. J. “Identification, sequence analysis, and expression of a |
| | | phosphoglycerate kinase; triosephosphate | Corynebacterium glutamicum gene cluster encoding the three glycolytic |
| | | isomerase | enzymes glyceraldehyde-3-phosphate dehydrogenase, 3-phosphoglycerate |
| | | | kinase, and triosephosphate isomeras,” J. Bacteriol., 174(19): 6076-6086 |
| | | | (1992) |
| X59404 | gdh | Glutamate dehydrogenase | Bormann, E. R. et al. “Molecular analysis of the Corynebacterium glutamicum |
| | | | gdh gene encoding glutamate dehydrogenase,” Mol. Microbiol., 6(3): 317-326 |
| | | | (1992) |
| X60312 | lysI | L-lysine permease | Seep-Feldhaus, A. H. et al. “Molecular analysis of the Corynebacterium |
| | | | glutamicum lysl gene involved in lysine uptake,” Mol. Microbiol., 5(12): 2995-3005 |
| | | | (1991) |
| X66078 | cop1 | Ps1 protein | Joliff, G. et al. “Cloning and nucleotide sequence of the csp1 gene encoding |
| | | | PS1, one of the two major secreted proteins of Corynebacterium glutamicum: |
| | | | The deduced N-terminal region of PS1 is similar to the Mycobacterium antigen |
| | | | 85 complex,” Mol. Microbiol., 6(16): 2349-2362 (1992) |
| X66112 | glt | Citrate synthase | Eikmanns, B. J. et al. “Cloning sequence, expression and transcriptional |
| | | | analysis of the Corynebacterium glutamicum gltA gene encoding citrate synthase,” Microbiol., 140: |
| | | | 1817-1828 (1994) |
| X67737 | dapB | Dihydrodipicolinate reductase | |
| X69103 | csp2 | Surface layer protein PS2 | Peyret, J. L. et al. “Characterization of the cspB gene encoding PS2, an ordered |
| | | | surface-layer protein in Corynebacterium glutamicum,” Mol. Microbiol., |
| | | | 9(1): 97-109 (1993) |
| X69104 | | IS3 related insertion element | Bonamy, C. et al. “Identification of IS1206, a Corynebacterium glutamicum |
| | | | IS3-related insertion sequence and phylogenetic analysis,” Mol. Microbiol., |
| | | | 14(3): 571-581 (1994) |
| X70959 | leuA | Isopropylmalate synthase | Patek, M. et al. “Leucine synthesis in Corynebacterium glutamicum: enzyme |
| | | | activities, structure of leuA, and effect of leuA inactivation on lysine |
| | | | synthesis,” Appl. Environ. Microbiol., 60(1): 133-140 (1994) |
| X71489 | icd | Isocitrate dehydrogenase (NADP+) | Eikmanns, B. J. et al. “Cloning sequence analysis, expression, and inactivation |
| | | | of the Corynebacterium glutamicum icd gene encoding isocitrate |
| | | | dehydrogenase and biochemical characterization of the enzyme,” J. Bacteriol., |
| | | | 177(3): 774-782 (1995) |
| X72855 | GDHA | Glutamate dehydrogenase (NADP+) | |
| X75083, | mtrA | 5-methyltryptophan resistance | Heery, D. M. et al. “A sequence from a tryptophan-hyperproducing strain of |
| X70584 | | | Corynebacterium glutamicum encoding resistance to 5-methyltryptophan,” |
| | | | Biochem. Biophys. Res. Commun., 201(3): 1255-1262 (1994) |
| X75085 | recA | | Fitzpatrick, R. et al. “Construction and characterization of recA mutant strains |
| | | | of Corynebacterium glutamicum and Brevibacterium lactofermentum,” Appl. |
| | | | Microbiol. Biotechnol., 42(4): 575-580 (1994) |
| X75504 | aceA; thiX | Partial Isocitrate lyase; ? | Reinscheid, D. J. et al. “Characterization of the isocitrate lyase gene from |
| | | | Corynebacterium glutamicum and biochemical analysis of the enzyme,” J. Bacteriol., 176(12): 3474-3483 |
| | | | (1994) |
| X76875 | | ATPase beta-subunit | Ludwig, W. et al. “Phylogenetic relationships of bacteria based on comparative |
| | | | sequence analysis of elongation factor Tu and ATP-synthase beta-subunit genes,” Antonie |
| | | | Van Leeuwenhoek, 64: 285-305 (1993) |
| X77034 | tuf | Elongation factor Tu | Ludwig, W. et al. “Phylogenetic relationships of bacteria based on comparative |
| | | | sequence analysis of elongation factor Tu and ATP-synthase beta-subunit |
| | | | genes,” Antonie Van Leeuwenhoek, 64: 285-305 (1993) |
| X77384 | recA | | Billman-Jacobe, H. “Nucleotide sequence of a recA gene from |
| | | | Corynebacterium glutamicum,” DNA Seq., 4(6): 403-404 (1994) |
| X78491 | aceB | Malate synthase | Reinscheid, D. J. et al. “Malate synthase from Corynebacterium glutamicum |
| | | | pta-ack operon encoding phosphotransacetylase: sequence analysis,” Microbiology, |
| | | | 140: 3099-3108 (1994) |
| X80629 | 16S rDNA | 16S ribosomal RNA | Rainey, F. A. et al. “Phylogenetic analysis of the genera Rhodococcus and |
| | | | Norcardia and evidence for the evolutionary origin of the genus Norcardia |
| | | | from within the radiation of Rhodococcus species,” Microbiol., 141: 523-528 |
| | | | (1995) |
| X81191 | gluA; gluB; gluC; | Glutamate uptake system | Kronemeyer, W. et al. “Structure of the gluABCD cluster encoding the |
| | gluD | | glutamate uptake system of Corynebacterium glutamicum,” J. Bacteriol., 177(5): |
| | | | 1152-1158 (1995) |
| X81379 | dapE | Succinyldiaminopimelate desuccinylase | Wehrmann, A. et al. “Analysis of different DNA fragments of |
| | | | Corynebacterium glutamicum complementing dapE of Escherichia coli,” Microbiology, 40: 3349-56 |
| | | | (1994) |
| X82061 | 16S rDNA | 16S ribosomal RNA | Ruimy, R. et al. “Phylogeny of the genus Corynebacterium deduced from |
| | | | analyses of small-subunit ribosomal DNA sequences,” Int. J. Syst. Bacteriol., 45(4): |
| | | | 740-746 (1995) |
| X82928 | asd; lysC | Aspartate-semialdehyde dehydrogenase; ? | Serebrijski, I. et al. “Multicopy suppression by asd gene and osmotic stress- |
| | | | dependent complementation by heterologous proA in proA mutants,” J. |
| | | | Bacteriol., 177(24): 7255-7260 (1995) |
| X82929 | proA | Gamma-glutamyl phosphate reductase | Serebrijski, I. et al. “Multicopy suppression by asd gene and osmotic stress- |
| | | | dependent complementation by heterologous proA in proA mutants,” J. Bacteriol., 177(24): |
| | | | 7255-7260 (1995) |
| X84257 | 16S rDNA | 16S ribosomal RNA | Pascual, C. et al. “Phylogenetic analysis of the genus Corynebacterium based |
| | | | on 16S rRNA gene sequences,” Int. J. Syst. Bacteriol., 45(4): 724-728 (1995) |
| X85965 | aroP; dapE | Aromatic amino acid permease; ? | Wehrmann, A. et al. “Functional analysis of sequences adjacent to dapE of |
| | | | Corynebacterium glutamicumproline reveals the presence of aroP, which |
| | | | encodes the aromatic amino acid transporter,” J. Bacteriol., 177(20): 5991-5993 |
| | | | (1995) |
| X86157 | argB; argC; argD; | Acetylglutamate kinase; N-acetyl-gamma- | Sakanyan, V. et al. “Genes and enzymes of the acetyl cycle of arginine |
| | argF; argJ | glutamyl-phosphate reductase; | biosynthesis in Corynebacterium glutamicum: enzyme evolution in the early |
| | | acetylornithine aminotransferase; ornithine | steps of the arginine pathway,” Microbiology, 142: 99-108 (1996) |
| | | carbamoyltransferase; glutamate N- | |
| | | acetyltransferase | |
| X89084 | pta; ackA | Phosphate acetyltransferase; acetate kinase | Reinscheid, D. J. et al. “Cloning, sequence analysis, expression and inactivation |
| | | | of the Corynebacterium glutamicum pta-ack operon encoding |
| | | | phosphotransacetylase and acetate kinase,” Microbiology, 145: 503-513 (1999) |
| X89850 | attB | Attachment site | Le Marrec, C. et al. “Genetic characterization of site-specific integration |
| | | | functions of phi AAU2 infecting “Arthrobacter aureus C70,” J. Bacteriol., 178(7): 1996-2004 |
| | | | (1996) |
| X90356 | | Promoter fragment F1 | Patek, M. et al. “Promoters from Corynebacterium glutamicum: cloning, |
| | | | molecular analysis and search for a consensus motif,” Microbiology, |
| | | | 142: 1297-1309 (1996) |
| X90357 | | Promoter fragment F2 | Patek, M. et al. “Promoters from Corynebacterium glutamicum: cloning, |
| | | | molecular analysis and search for a consensus motif,” Microbiology, 142: 1297-1309 |
| | | | (1996) |
| X90358 | | Promoter fragment F10 | Patek, M. et al. “Promoters from Corynebacterium glutamicum: cloning, |
| | | | molecular analysis and search for a consensus motif,” Microbiology, |
| | | | 142: 1297-1309 (1996) |
| X90359 | | Promoter fragment F13 | Patek, M. et al. “Promoters from Corynebacterium glutamicum: cloning, |
| | | | molecular analysis and search for a consensus motif,” Microbiology, |
| | | | 142: 1297-1309 (1996) |
| X90360 | | Promoter fragment F22 | Patek, M. et al. “Promoters from Corynebacterium glutamicum: cloning, |
| | | | molecular analysis and search for a consensus motif,” Microbiology, |
| | | | 142: 1297-1309 (1996) |
| X90361 | | Promoter fragment F34 | Patek, M. et al. “Promoters from Corynebacterium glutamicum: cloning, |
| | | | molecular analysis and search for a consensus motif,” Microbiology, |
| | | | 142: 1297-1309 (1996) |
| X90362 | | Promoter fragment F37 | Patek, M. et al. “Promoters from Corynebacterium glutamicum: cloning, |
| | | | molecular analysis and search for a consensus motif,” Microbiology, |
| | | | 142: 1297-1309 (1996) |
| X90363 | | Promoter fragment F45 | Patek, M. et al. “Promoters from Corynebacterium glutamicum: cloning, |
| | | | molecular analysis and search for a consensus motif,” Microbiology, 142: 1297-1309 |
| | | | (1996) |
| X90364 | | Promoter fragment F64 | Patek, M. et al. “Promoters from Corynebacterium glutamicum: cloning, |
| | | | molecular analysis and search for a consensus motif,” Microbiology, |
| | | | 142: 1297-1309 (1996) |
| X90365 | | Promoter fragment F75 | Patek, M. et al. “Promoters from Corynebacterium glutamicum: cloning, |
| | | | molecular analysis and search for a consensus motif,” Microbiology, |
| | | | 142: 1297-1309 (1996) |
| X90366 | | Promoter fragment PF101 | Patek, M. et al. “Promoters from Corynebacterium glutamicum: cloning, |
| | | | molecular analysis and search for a consensus motif,” Microbiology, |
| | | | 142: 1297-1309 (1996) |
| X90367 | | Promoter fragment PF104 | Patek, M. et al. “Promoters from Corynebacterium glutamicum: cloning, |
| | | | molecular analysis and search for a consensus motif,” Microbiology, 142: 1297-1309 |
| | | | (1996) |
| X90368 | | Promoter fragment PF109 | Patek, M. et al. “Promoters from Corynebacterium glutamicum: cloning, |
| | | | molecular analysis and search for a consensus motif,” Microbiology, 142: 1297-1309 |
| | | | (1996) |
| X93513 | amt | Ammonium transport system | Siewe, R. M. et al. “Functional and genetic characterization of the (methyl) |
| | | | ammonium uptake carrier of Corynebacterium glutamicum,” J. Biol. Chem., 271(10): 5398-5403 |
| | | | (1996) |
| X93514 | betP | Glycine betaine transport system | Peter, H. et al. “Isolation, characterization, and expression of the |
| | | | Corynebacterium glutamicum betP gene, encoding the transport system for the |
| | | | compatible solute glycine betaine,” J. Bacteriol., 178(17): 5229-5234 (1996) |
| X95649 | orf4 | | Patek, M. et al. “Identification and transcriptional analysis of the dapB-ORF2- |
| | | | dapA-ORF4 operon of Corynebacterium glutamicum, encoding two enzymes |
| | | | involved in L-lysine synthesis,” Biotechnol. Lett., 19: 1113-1117 (1997) |
| X96471 | lysE; lysG | Lysine exporter protein; Lysine export | Vrljic, M. et al. “A new type of transporter with a new type of cellular |
| | | regulator protein | function: L-lysine export from Corynebacterium glutamicum,” Mol. Microbiol., 22(5): 815-826 |
| | | | (1996) |
| X96580 | panB; panC; xylB | 3-methyl-2-oxobutanoate | Sahm, H. et al. “D-pantothenate synthesis in Corynebacterium glutamicum and |
| | | hydroxymethyltransferase; pantoate-beta- | use of panBC and genes encoding L-valine synthesis for D-pantothenate |
| | | alanine ligase; xylulokinase | overproduction,” Appl. Environ. Microbiol., 65(5): 1973-1979 (1999) |
| X96962 | | Insertion sequence IS1207 and transposase | |
| X99289 | | Elongation factor P | Ramos, A. et al. “Cloning, sequencing and expression of the gene encoding |
| | | | elongation factor P in the amino-acid producer Brevibacterium lactofermentum |
| | | | (Corynebacterium glutamicum ATCC 13869),” Gene, 198: 217-222 (1997) |
| Y00140 | thrB | Homoserine kinase | Mateos, L. M. et al. “Nucleotide sequence of the homoserine kinase (thrB) gene |
| | | | of the Brevibacterium lactofermentum,” Nucleic Acids Res., 15(9): 3922 (1987) |
| Y00151 | ddh | Meso-diaminopimelate D-dehydrogenase | Ishino, S. et al. “Nucleotide sequence of the meso-diaminopimelate D- |
| | | (EC 1.4.1.16) | dehydrogenase gene from Corynebacterium glutamicum,” Nucleic Acids Res., |
| | | | 15(9): 3917 (1987) |
| Y00476 | thrA | Homoserine dehydrogenase | Mateos, L. M. et al. “Nucleotide sequence of the homoserine dehydrogenase |
| | | | (thrA) gene of the Brevibacterium lactofermentum,” Nucleic Acids Res., 15(24): 10598 (1987) |
| Y00546 | hom; thrB | Homoserine dehydrogenase; homoserine | Peoples, O. P. et al. “Nucleotide sequence and fine structural analysis of the |
| | | kinase | Corynebacterium glutamicum hom-thrB operon,” Mol. Microbiol., 2(1): 63-72 |
| | | | (1988) |
| Y08964 | murC; ftsQ/divD; ftsZ | UPD-N-acetylmuramate-alanine ligase; | Honrubia, M. P. et al. “Identification, characterization, and chromosomal |
| | | division initiation protein or cell division | organization of the ftsZ gene from Brevibacterium lactofermentum,” Mol. Gen. Genet., 259(1): 97-104 |
| | | protein; cell division protein | (1998) |
| Y09163 | putP | High affinity proline transport system | Peter, H. et al. “Isolation of the putP gene of Corynebacterium |
| | | | glutamicumproline and characterization of a low-affinity uptake system for |
| | | | compatible solutes,” Arch. Microbiol., 168(2): 143-151 (1997) |
| Y09548 | pyc | Pyruvate carboxylase | Peters-Wendisch, P. G. et al. “Pyruvate carboxylase from Corynebacterium |
| | | | glutamicum: characterization, expression and inactivation of the pyc gene,” Microbiology, 144: 915-927 |
| | | | (1998) |
| Y09578 | leuB | 3-isopropylmalate dehydrogenase | Patek, M. et al. “Analysis of the leuB gene from Corynebacterium |
| | | | glutamicum,” Appl. Microbiol. Biotechnol., 50(1): 42-47 (1998) |
| Y12472 | | Attachment site bacteriophage Phi-16 | Moreau, S. et al. “Site-specific integration of corynephage Phi-16: The |
| | | | construction of an integration vector,” Microbiol., 145: 539-548 (1999) |
| Y12537 | proP | Proline/ectoine uptake system protein | Peter, H. et al. “Corynebacterium glutamicum is equipped with four secondary |
| | | | carriers for compatible solutes: Identification, sequencing, and characterization |
| | | | of the proline/ectoine uptake system, ProP, and the ectoine/proline/glycine betaine carrier, EctP,” J. Bacteriol., 180(22): |
| | | | 6005-6012 (1998) |
| Y13221 | glnA | Glutamine synthetase I | Jakoby, M. et al. “Isolation of Corynebacterium glutamicum glnA gene |
| | | | encoding glutamine synthetase I,” FEMS Microbiol. Lett., 154(1): 81-88 (1997) |
| Y16642 | lpd | Dihydrolipoamide dehydrogenase | |
| Y18059 | | Attachment site Corynephage 304L | Moreau, S. et al. “Analysis of the integration functions of &phi; 304L: An |
| | | | integrase module among corynephages,” Virology, 255(1): 150-159 (1999) |
| Z21501 | argS; lysA | Arginyl-tRNA synthetase; diaminopimelate | Oguiza, J. A. et al. “A gene encoding arginyl-tRNA synthetase is located in the |
| | | decarboxylase (partial) | upstream region of the lysA gene in Brevibacterium lactofermentum: |
| | | | Regulation of argS-lysA cluster expression by arginine,” J. |
| | | | Bacteriol., 175(22): 7356-7362 (1993) |
| Z21502 | dapA; dapB | Dihydrodipicolinate synthase; | Pisabarro, A. et al. “A cluster of three genes (dapA, orf2, and dapB) of |
| | | dihydrodipicolinate reductase | Brevibacterium lactofermentum encodes dihydrodipicolinate reductase, and a |
| | | | third polypeptide of unknown function,” J. Bacteriol., 175(9): 2743-2749 |
| | | | (1993) |
| Z29563 | thrC | Threonine synthase | Malumbres, M. et al. “Analysis and expression of the thrC gene of the encoded |
| | | | threonine synthase,” Appl. Environ. Microbiol., 60(7)2209-2219 (1994) |
| Z46753 | 16S rDNA | Gene for 16S ribosomal RNA | |
| Z49822 | sigA | SigA sigma factor | Oguiza, J. A. et al “Multiple sigma factor genes in Brevibacterium |
| | | | lactofermentum: Characterization of sigA and sigB,” J. Bacteriol., 178(2): 550-553 |
| | | | (1996) |
| Z49823 | galE; dtxR | Catalytic activity UDP-galactose 4- | Oguiza, J. A. et al “The galE gene encoding the UDP-galactose 4-epimerase of |
| | | epimerase; diphtheria toxin regulatory | Brevibacterium lactofermentum is coupled transcriptionally to the dmdR |
| | | protein | gene,” Gene, 177: 103-107 (1996) |
| Z49824 | orfl; sigB | ?; SigB sigma factor | Oguiza, J. A. et al. “Multiple sigma factor genes in Brevibacterium |
| | | | lactofermentum: Characterization of sigA and sigB,” J. Bacteriol., 178(2): 550-553 |
| | | | (1996) |
| Z66534 | | Transposase | Correia, A. et al. “Cloning and characterization of an IS-like element present in |
| | | | the genome of Brevibacterium lactofermentum ATCC 13869,” Gene, 170(1): 91-94 (1996) |

¹A sequence for this gene was published in the indicated reference. However, the sequence obtained by the inventors of the present application is significantly longer than the published version. It is believed that the published version relied on an incorrect start codon, and thus represents only a fragment of the actual coding region.

[0171] TABLE 1
GENES IN THE APPLICATION

| Nucleic | | | | | |
|---|---|---|---|---|---|
| Acid | Amino | | | | |
| SEQ | Acid SEQ | Identification | | | |
| ID NO | ID NO | Code | Contig. | NT Start | NT Stop |
| 1 | 2 | RXN01638 | VV0005 | 54646 | 55545 |
| 3 | 4 | F RXA01638 | GR00456 | 825 | 436 |
| 5 | 6 | F RXA01639 | GR00456 | 1334 | 897 |
| 7 | 8 | RXN01590 | VV0015 | 66740 | 60294 |
| 9 | 10 | F RXA01590 | GR00445 | 1710 | 427 |
| 11 | 12 | F RXA01542 | GR00429 | 3 | 5063 |
| 13 | 14 | RXN01539 | VV0015 | 60006 | 57841 |
| 15 | 16 | F RXA01539 | GR00428 | 120 | 2042 |
| 17 | 18 | RXN01422 | VV0122 | 17001 | 16030 |
| 19 | 20 | F RXA01422 | GR00416 | 2003 | 1221 |
| 21 | 22 | RXN01403 | VV0126 | 4644 | 3997 |
| 23 | 24 | F RXA01403 | GR00409 | 4410 | 3997 |
| 25 | 26 | RXN01326 | VV0102 | 23923 | 24288 |
| 27 | 28 | F RXA01326 | GR00386 | 45 | 338 |
| 29 | 30 | RXN01301 | VV0068 | 8224 | 8748 |
| 31 | 32 | F RXA01301 | GR00375 | 1993 | 1589 |
| 33 | 34 | RXN01276 | VV0009 | 31190 | 31633 |
| 35 | 36 | F RXA01276 | GR00367 | 29993 | 30538 |
| 37 | 38 | RXN01231 | VV0020 | 30144 | 29902 |
| 39 | 40 | F RXA01231 | GR00356 | 1384 | 1887 |
| 41 | 42 | RXN01210 | VV0169 | 4230 | 5060 |
| 43 | 44 | F RXA01210 | GR00349 | 3 | 695 |
| 45 | 46 | RXN01206 | VV0268 | 303 | 4 |
| 47 | 48 | F RXA01206 | GR00346 | 593 | 853 |
| 49 | 50 | RXN01121 | VV0182 | 5808 | 6893 |
| 51 | 52 | F RXA01121 | GR00310 | 2479 | 3156 |
| 53 | 54 | RXN01085 | VV0093 | 16599 | 15721 |
| 55 | 56 | F RXA01085 | GR00303 | 960 | 4 |
| 57 | 58 | RXN00022 | VV0015 | 27262 | 28962 |
| 59 | 60 | F RXA00022 | GR00002 | 20563 | 21297 |
| 61 | 62 | F RXA01921 | GR00551 | 943 | 5 |
| 63 | 64 | RXN00027 | VV0127 | 60015 | 59650 |
| 65 | 66 | F RXA00027 | GR00003 | 5142 | 5507 |
| 67 | 68 | RXN00028 | VV0127 | 57099 | 59045 |
| 69 | 70 | F RXA00028 | GR00003 | 8058 | 6112 |
| 71 | 72 | RXN00033 | VV0127 | 51753 | 53087 |
| 73 | 74 | RXN00056 | VV0044 | 11980 | 12729 |
| 75 | 76 | F RXA00056 | GR00009 | 1463 | 714 |
| 77 | 78 | RXN00067 | VV0019 | 29740 | 29255 |
| 79 | 80 | F RXA00067 | GR00011 | 708 | 223 |
| 81 | 82 | RXN00077 | VV0154 | 4222 | 5583 |
| 83 | 84 | F RXA00077 | GR00012 | 4228 | 5589 |
| 85 | 86 | RXN00080 | VV0154 | 8446 | 6917 |
| 87 | 88 | F RXA00080 | GR00012 | 7342 | 6923 |
| 89 | 90 | RXN00087 | VV0048 | 204 | 731 |
| 91 | 92 | F RXA00087 | GR00013 | 3983 | 3456 |
| 93 | 94 | RXN00096 | VV0129 | 22302 | 22000 |
| 95 | 96 | F RXA00096 | GR00014 | 4746 | 5048 |
| 97 | 98 | RXN00097 | VV0129 | 21841 | 20666 |
| 99 | 100 | F RXA00097 | GR00014 | 5222 | 6382 |
| 101 | 102 | RXN00114 | VV0129 | 5849 | 6337 |
| 103 | 104 | F RXA00114 | GR00017 | 3420 | 3908 |
| 105 | 106 | RXN00120 | VV0142 | 2612 | 3451 |
| 107 | 108 | F RXA00120 | GR00019 | 2798 | 3451 |
| 109 | 110 | RXN00128 | VV0124 | 7960 | 9663 |
| 111 | 112 | F RXA00128 | GR00020 | 4709 | 3006 |
| 113 | 114 | RXN00154 | VV0167 | 3283 | 4125 |
| 115 | 116 | F RXA00154 | GR00023 | 8568 | 7726 |
| 117 | 118 | RXN00162 | VV0084 | 9489 | 9842 |
| 119 | 120 | F RXA00162 | GR00024 | 5438 | 5791 |
| 121 | 122 | RXN00167 | VV0232 | 4324 | 4821 |
| 123 | 124 | F RXA00167 | GR00025 | 4324 | 4584 |
| 125 | 126 | RXN00171 | VV0031 | 5311 | 5054 |
| 127 | 128 | F RXA00171 | GR00026 | 10316 | 10086 |
| 129 | 130 | RXN00194 | VV0115 | 4174 | 4614 |
| 131 | 132 | F RXA00194 | GR00030 | 290 | 6 |
| 133 | 134 | RXN00197 | VV0115 | 2733 | 1522 |
| 135 | 136 | F RXA00197 | GR00030 | 1731 | 2741 |
| 137 | 138 | RXN00216 | VV0096 | 16292 | 15303 |
| 139 | 140 | RXN00222 | VV0096 | 21079 | 22224 |
| 141 | 142 | F RXA00222 | GR00032 | 21073 | 22218 |
| 143 | 144 | RXN00232 | VV0214 | 601 | 92 |
| 145 | 146 | F RXA00232 | GR00035 | 527 | 18 |
| 147 | 148 | RXN00236 | VV0133 | 3300 | 2575 |
| 149 | 150 | F RXA00236 | GR00036 | 3300 | 2575 |
| 151 | 152 | RXN00242 | VV0133 | 7031 | 8308 |
| 153 | 154 | F RXA00242 | GR00036 | 7031 | 8233 |
| 155 | 156 | RXN00247 | VV0057 | 35082 | 34156 |
| 157 | 158 | F RXA00247 | GR00037 | 7097 | 6171 |
| 159 | 160 | RXN00256 | VV0015 | 3794 | 4564 |
| 161 | 162 | F RXA00256 | GR00039 | 968 | 1738 |
| 163 | 164 | RXN00264 | VV0123 | 14046 | 13669 |
| 165 | 166 | F RXA00264 | GR00040 | 2459 | 2836 |
| 167 | 168 | RXN00267 | VV0123 | 12366 | 12683 |
| 169 | 170 | F RXA00267 | GR00040 | 4091 | 3822 |
| 171 | 172 | RXN00271 | VV0019 | 4975 | 3986 |
| 173 | 174 | F RXA00271 | GR00041 | 3709 | 2720 |
| 175 | 176 | RXN00272 | VV0019 | 5686 | 6057 |
| 177 | 178 | F RXA00272 | GR00041 | 4420 | 4791 |
| 179 | 180 | RXN00283 | VV0127 | 33097 | 32066 |
| 181 | 182 | F RXA00283 | GR00045 | 142 | 1269 |
| 183 | 184 | RXN00334 | VV0197 | 3581 | 3246 |
| 185 | 186 | F RXA00334 | GR00057 | 16762 | 17097 |
| 187 | 188 | RXN00338 | VV0197 | 26797 | 25658 |
| 189 | 190 | F RXA00338 | GR00059 | 1 | 783 |
| 191 | 192 | F RXA00318 | GR00055 | 426 | 635 |
| 193 | 194 | RXN00342 | VV0049 | 1576 | 1148 |
| 195 | 196 | F RXA00342 | GR00061 | 73 | 501 |
| 197 | 198 | RXN00344 | VV0135 | 42719 | 43597 |
| 199 | 200 | F RXA00344 | GR00063 | 6 | 584 |
| 201 | 202 | RXN00353 | VV0135 | 32107 | 32799 |
| 203 | 204 | F RXA00353 | GR00068 | 988 | 1680 |
| 205 | 206 | RXN00354 | VV0135 | 33604 | 32792 |
| 207 | 208 | RXN00362 | VV0176 | 33334 | 34680 |
| 209 | 210 | F RXA00362 | GR00073 | 2 | 961 |
| 211 | 212 | RXN00373 | VV0226 | 6002 | 6340 |
| 213 | 214 | F RXA00373 | GR00079 | 342 | 4 |
| 215 | 216 | RXN00390 | VV0025 | 9834 | 9430 |
| 217 | 218 | F RXA00390 | GR00086 | 1437 | 1841 |
| 219 | 220 | RXN00399 | VV0025 | 13735 | 13421 |
| 221 | 222 | F RXA00399 | GR00087 | 830 | 1144 |
| 223 | 224 | RXN00416 | VV0181 | 1 | |
| 225 | 226 | F RXA00416 | GR00093 | 1 | 327 |
| 227 | 228 | F RXA00418 | GR00094 | 1 | 1065 |
| 229 | 230 | RXN00422 | VV0112 | 3820 | 4713 |
| 231 | 232 | F RXA00422 | GR00097 | 428 | 6 |
| 233 | 234 | RXN00447 | VV0112 | 23325 | 22906 |
| 235 | 236 | F RXA00447 | GR00108 | 518 | 817 |
| 237 | 238 | RXN00455 | VV0076 | 5523 | 4774 |
| 239 | 240 | F RXA00455 | GR00113 | 2 | 619 |
| 241 | 242 | RXN00473 | VV0086 | 31493 | 32281 |
| 243 | 244 | F RXA00473 | GR00119 | 5799 | 6563 |
| 245 | 246 | RXN00485 | VV0086 | 51200 | 48906 |
| 247 | 248 | F RXA00485 | GR00119 | 25230 | 23188 |
| 249 | 250 | RXN00496 | VV0086 | 17452 | 18477 |
| 251 | 252 | F RXA00496 | GR00123 | 1776 | 2177 |
| 253 | 254 | RXN00503 | VV0086 | 11688 | 13409 |
| 255 | 256 | RXN00504 | VV0086 | 13486 | 13905 |
| 257 | 258 | F RXA00504 | GR00125 | 5007 | 5252 |
| 259 | 260 | RXN00505 | VV0086 | 5810 | 6304 |
| 261 | 262 | F RXA00505 | GR00126 | 1 | 252 |
| 263 | 264 | RXN00507 | VV0086 | 4606 | 3752 |
| 265 | 266 | F RXA00507 | GR00127 | 1098 | 244 |
| 267 | 268 | RXN00510 | VV0086 | 1924 | 3432 |
| 269 | 270 | F RXA00509 | GR00128 | 316 | 140 |
| 271 | 272 | F RXA00510 | GR00128 | 384 | 914 |
| 273 | 274 | RXN00515 | VV0144 | 3289 | 2588 |
| 275 | 276 | F RXA00515 | GR00131 | 3 | 482 |
| 277 | 278 | F RXA00520 | GR00132 | 599 | 796 |
| 279 | 280 | RXN00527 | VV0079 | 23845 | 25608 |
| 281 | 282 | F RXA00527 | GR00136 | 3123 | 1360 |
| 283 | 284 | RXN00547 | VV0079 | 33886 | 35283 |
| 285 | 286 | F RXA00547 | GR00142 | 641 | 1054 |
| 287 | 288 | F RXA00546 | GR00142 | 1 | 690 |
| 289 | 290 | RXN00552 | VV0079 | 27617 | 28552 |
| 291 | 292 | F RXA00552 | GR00145 | 2 | 718 |
| 293 | 294 | RXN00555 | VV0079 | 30437 | 29499 |
| 295 | 296 | F RXA00555 | GR00145 | 2555 | 1665 |
| 297 | 298 | RXN00560 | VV0103 | 7606 | 7980 |
| 299 | 300 | F RXA00560 | GR00149 | 256 | 492 |
| 301 | 302 | RXN00574 | VV0323 | 16133 | 15255 |
| 303 | 304 | F RXA00574 | GR00156 | 767 | 1645 |
| 305 | 306 | RXN00589 | VV0323 | 2680 | 2231 |
| 307 | 308 | F RXA00589 | GR00156 | 14220 | 14582 |
| 309 | 310 | RXN00616 | VV0054 | 5670 | 5326 |
| 311 | 312 | F RXA00616 | GR00162 | 3574 | 3918 |
| 313 | 314 | RXN00647 | VV0109 | 12861 | 12229 |
| 315 | 316 | F RXA00647 | GR00169 | 641 | 1273 |
| 317 | 318 | RXN00653 | VV0109 | 6578 | 7342 |
| 319 | 320 | F RXA00653 | GR00169 | 6924 | 6160 |
| 321 | 322 | RXN00662 | VV0142 | 7711 | 8979 |
| 323 | 324 | F RXA00662 | GR00172 | 2671 | 1403 |
| 325 | 326 | RXN00666 | VV0109 | 1566 | 2480 |
| 327 | 328 | F RXA00666 | GR00175 | 390 | 4 |
| 329 | 330 | RXN00704 | VV0005 | 9240 | 9866 |
| 331 | 332 | F RXA00704 | GR00183 | 2972 | 3484 |
| 333 | 334 | RXN00712 | VV0005 | 1195 | 500 |
| 335 | 336 | F RXA00712 | GR00187 | 1048 | 500 |
| 337 | 338 | RXN00720 | VV0232 | 4899 | 5564 |
| 339 | 340 | F RXA00720 | GR00188 | 7665 | 7000 |
| 341 | 342 | RXN00722 | VV0052 | 2 | |
| 343 | 344 | F RXA00722 | GR00189 | 1015 | 512 |
| 345 | 346 | RXN00729 | VV0024 | 3903 | 2926 |
| 347 | 348 | F RXA00729 | GR00194 | 1 | 642 |
| 349 | 350 | F RXA02867 | GR10008 | 610 | 5 |
| 351 | 352 | RXN00730 | VV0024 | 2031 | 2837 |
| 353 | 354 | F RXA00730 | GR00194 | 1063 | 731 |
| 355 | 356 | RXN00731 | VV0133 | 8314 | 10809 |
| 357 | 358 | F RXA00731 | GR00195 | 2613 | 142 |
| 359 | 360 | RXN00738 | VV0254 | 3 | |
| 361 | 362 | F RXA00738 | GR00201 | 78 | 365 |
| 363 | 364 | RXN00750 | VV0010 | 30086 | 30523 |
| 365 | 366 | F RXA00750 | GR00202 | 18937 | 19374 |
| 367 | 368 | RXN00762 | VV0103 | 16953 | 17828 |
| 369 | 370 | RXN00768 | VV0103 | 12997 | 11879 |
| 371 | 372 | F RXA00768 | GR00204 | 5956 | 6399 |
| 373 | 374 | F RXA00767 | GR00204 | 5280 | 5993 |
| 375 | 376 | RXN00769 | VV0103 | 11654 | 11442 |
| 377 | 378 | F RXA00769 | GR00204 | 6624 | 6836 |
| 379 | 380 | RXN00771 | VV0103 | 26639 | 27457 |
| 381 | 382 | F RXA00771 | GR00205 | 857 | 180 |
| 383 | 384 | RXN00785 | VV0321 | 2 | 658 |
| 385 | 386 | F RXA00785 | GR00207 | 625 | 5 |
| 387 | 388 | RXN00795 | VV0321 | 6259 | 5732 |
| 389 | 390 | F RXA00795 | GR00211 | 4228 | 4755 |
| 391 | 392 | RXN00831 | VV0180 | 4205 | 4906 |
| 393 | 394 | F RXA00831 | GR00224 | 1662 | 961 |
| 395 | 396 | RXN00835 | VV0138 | 12068 | 13021 |
| 397 | 398 | F RXA00835 | GR00226 | 3 | 692 |
| 399 | 400 | RXN00836 | VV0138 | 13126 | 14841 |
| 401 | 402 | F RXA00836 | GR00226 | 797 | 2467 |
| 403 | 404 | RXN00840 | VV0138 | 6220 | 6933 |
| 405 | 406 | F RXA00840 | GR00228 | 742 | 1455 |
| 407 | 408 | RXN00841 | VV0138 | 6944 | 7480 |
| 409 | 410 | F RXA00841 | GR00228 | 1466 | 2002 |
| 411 | 412 | RXN00846 | VV0138 | 2367 | 1498 |
| 413 | 414 | F RXA00846 | GR00230 | 391 | 5 |
| 415 | 416 | RXN00850 | VV0067 | 4148 | 3321 |
| 417 | 418 | RXN00854 | VV0067 | 371 | 159 |
| 419 | 420 | F RXA00854 | GR00231 | 4708 | 4920 |
| 421 | 422 | RXN00855 | VV0255 | 735 | 1019 |
| 423 | 424 | F RXA00855 | GR00232 | 526 | 242 |
| 425 | 426 | RXN00869 | VV0127 | 5599 | 4679 |
| 427 | 428 | F RXA00869 | GR00239 | 1 | 792 |
| 429 | 430 | RXN00915 | VV0238 | 886 | 257 |
| 431 | 432 | F RXA00915 | GR00251 | 514 | 5 |
| 433 | 434 | RXN00917 | VV0238 | 7202 | 4524 |
| 435 | 436 | F RXA00917 | GR00251 | 5534 | 4152 |
| 437 | 438 | RXN00921 | VV0373 | 1 | 513 |
| 439 | 440 | F RXA00921 | GR00252 | 4750 | 2852 |
| 441 | 442 | RXN00943 | VV0116 | 11376 | 12287 |
| 443 | 444 | F RXA00943 | GR00258 | 3 | 509 |
| 445 | 446 | F RXA02423 | GR00706 | 221 | 6 |
| 447 | 448 | RXN00945 | VV0107 | 1876 | 2847 |
| 449 | 450 | RXN00946 | VV0107 | 3034 | 3807 |
| 451 | 452 | F RXA00946 | GR00259 | 3034 | 3807 |
| 453 | 454 | RXN00953 | VV0260 | 1834 | 1082 |
| 455 | 456 | RXN00959 | VV0208 | 402 | 857 |
| 457 | 458 | F RXA00959 | GR00265 | 402 | 728 |
| 459 | 460 | RXN00963 | VV0249 | 1816 | 2652 |
| 461 | 462 | F RXA00963 | GR00269 | 442 | 5 |
| 463 | 464 | RXN00971 | VV0149 | 14706 | 14389 |
| 465 | 466 | F RXA00971 | GR00273 | 1421 | 1149 |
| 467 | 468 | RXN00991 | VV0210 | 4424 | 3045 |
| 469 | 470 | RXN01004 | VV0210 | 3045 | 1984 |
| 471 | 472 | RXN01016 | VV0209 | 14476 | 15123 |
| 473 | 474 | F RXA01016 | GR00290 | 1141 | 494 |
| 475 | 476 | RXN01023 | VV0143 | 2343 | 3320 |
| 477 | 478 | F RXA01023 | GR00292 | 1817 | 867 |
| 479 | 480 | RXN01028 | VV0015 | 29000 | 31048 |
| 481 | 482 | F RXA01028 | GR00295 | 3 | 626 |
| 483 | 484 | F RXA01812 | GR00514 | 3 | 1232 |
| 485 | 486 | RXN01069 | VV0030 | 986 | 273 |
| 487 | 488 | F RXA01069 | GR00299 | 606 | 4 |
| 489 | 490 | RXN01071 | VV0030 | 4879 | 2816 |
| 491 | 492 | F RXA02898 | GR10040 | 1631 | 6 |
| 493 | 494 | F RXA01071 | GR00299 | 2822 | 2436 |
| 495 | 496 | RXN01075 | VV0084 | 42045 | 41635 |
| 497 | 498 | F RXA01075 | GR00300 | 3269 | 2859 |
| 499 | 500 | RXN01128 | VV0157 | 2427 | 3440 |
| 501 | 502 | F RXA01128 | GR00314 | 1325 | 312 |
| 503 | 504 | RXN01134 | VV0077 | 774 | 4 |
| 505 | 506 | F RXA01134 | GR00317 | 2 | 460 |
| 507 | 508 | RXN01140 | VV0077 | 1642 | 710 |
| 509 | 510 | F RXA01140 | GR00318 | 3272 | 4057 |
| 511 | 512 | RXN01148 | VV0136 | 3147 | 3746 |
| 513 | 514 | F RXA01148 | GR00323 | 1452 | 2051 |
| 515 | 516 | RXN01153 | VV0265 | 546 | 4 |
| 517 | 518 | F RXA01153 | GR00325 | 546 | 4 |
| 519 | 520 | RXN01154 | VV0266 | 644 | 6 |
| 521 | 522 | F RXA01154 | GR00326 | 608 | 6 |
| 523 | 524 | RXN01155 | VV0225 | 252 | 1721 |
| 525 | 526 | F RXA01155 | GR00327 | 1370 | 6 |
| 527 | 528 | RXN01167 | VV0117 | 12777 | 13172 |
| 529 | 530 | F RXA01167 | GR00333 | 3 | 323 |
| 531 | 532 | RXN01169 | VV0117 | 5804 | 6799 |
| 533 | 534 | F RXA01169 | GR00334 | 1 | 567 |
| 535 | 536 | RXN01173 | VV0117 | 11085 | 10471 |
| 537 | 538 | F RXA01173 | GR00334 | 4853 | 4239 |
| 539 | 540 | RXN01174 | VV0117 | 12236 | 11487 |
| 541 | 542 | F RXA01174 | GR00334 | 6004 | 5255 |
| 543 | 544 | RXN01229 | VV0020 | 32482 | 31205 |
| 545 | 546 | F RXA01229 | GR00355 | 2806 | 3498 |
| 547 | 548 | RXN01246 | VV0104 | 2815 | 3321 |
| 549 | 550 | F RXA01246 | GR00360 | 1824 | 2462 |
| 551 | 552 | RXN01249 | VV0271 | 1 | |
| 553 | 554 | F RXA01249 | GR00363 | 303 | 4 |
| 555 | 556 | RXN01251 | VV0219 | 13143 | 12835 |
| 557 | 558 | F RXA01251 | GR00365 | 228 | 536 |
| 559 | 560 | RXN01263 | VV0009 | 11816 | 12727 |
| 561 | 562 | F RXA01263 | GR00367 | 10720 | 11631 |
| 563 | 564 | RXN01266 | VV0009 | 15553 | 14519 |
| 565 | 566 | F RXA01266 | GR00367 | 14457 | 13423 |
| 567 | 568 | RXN01275 | VV0009 | 29514 | 30431 |
| 569 | 570 | F RXA01275 | GR00367 | 28418 | 29335 |
| 571 | 572 | RXN01281 | VV0212 | 4506 | 5267 |
| 573 | 574 | F RXA01281 | GR00369 | 3869 | 4630 |
| 575 | 576 | RXN01296 | VV0209 | 10462 | 9380 |
| 577 | 578 | F RXA01296 | GR00373 | 5836 | 4754 |
| 579 | 580 | RXN01306 | VV0148 | 8158 | 7151 |
| 581 | 582 | F RXA01306 | GR00376 | 5691 | 4684 |
| 583 | 584 | RXN01324 | VV0082 | 6588 | 6887 |
| 585 | 586 | RXN01331 | VV0005 | 39816 | 42212 |
| 587 | 588 | F RXA01331 | GR00387 | 1606 | 1031 |
| 589 | 590 | F RXA00668 | GR00176 | 797 | 6 |
| 591 | 592 | F RXA00674 | GR00177 | 755 | 6 |
| 593 | 594 | RXN01337 | VV0032 | 1925 | 3337 |
| 595 | 596 | F RXA01337 | GR00389 | 5065 | 3653 |
| 597 | 598 | RXN01351 | VV0123 | 2841 | 3425 |
| 599 | 600 | RXN01362 | VV0051 | 27040 | 23387 |
| 601 | 602 | F RXA01362 | GR00395 | 3 | 1397 |
| 603 | 604 | F RXA01364 | GR00396 | 1869 | 4 |
| 605 | 606 | RXN01379 | VV0091 | 10518 | 11459 |
| 607 | 608 | F RXA01379 | GR00402 | 926 | 6 |
| 609 | 610 | RXN01390 | VV0277 | 6654 | 7310 |
| 611 | 612 | F RXA01390 | GR00408 | 992 | 336 |
| 613 | 614 | RXN01391 | VV0277 | 5568 | 6257 |
| 615 | 616 | F RXA01391 | GR00408 | 2078 | 1389 |
| 617 | 618 | RXN01400 | VV0126 | 2988 | 1489 |
| 619 | 620 | F RXA01400 | GR00409 | 2988 | 1489 |
| 621 | 622 | RXN01409 | VV0278 | 5304 | 4483 |
| 623 | 624 | F RXA01409 | GR00410 | 5296 | 4481 |
| 625 | 626 | RXN01434 | VV0050 | 13792 | 10841 |
| 627 | 628 | F RXA01434 | GR00417 | 10228 | 9863 |
| 629 | 630 | RXN01448 | VV0089 | 9602 | 10768 |
| 631 | 632 | F RXA01448 | GR00418 | 19796 | 19017 |
| 633 | 634 | RXN01459 | VV0233 | 3311 | 4120 |
| 635 | 636 | F RXA01459 | GR00420 | 3311 | 4120 |
| 637 | 638 | RXN01460 | VV0233 | 4066 | 4359 |
| 639 | 640 | F RXA01460 | GR00420 | 4066 | 4359 |
| 641 | 642 | RXN01471 | VV0019 | 11467 | 10661 |
| 643 | 644 | F RXA01471 | GR00422 | 5243 | 4437 |
| 645 | 646 | RXN01479 | VV0019 | 18635 | 18874 |
| 647 | 648 | F RXA01479 | GR00422 | 12423 | 12650 |
| 649 | 650 | RXN01484 | VV0019 | 26292 | 25747 |
| 651 | 652 | F RXA01484 | GR00422 | 20068 | 19523 |
| 653 | 654 | RXN01485 | VV0019 | 26454 | 28505 |
| 655 | 656 | F RXA01485 | GR00422 | 20230 | 22281 |
| 657 | 658 | RXN01492 | VV0139 | 36004 | 36807 |
| 659 | 660 | F RXA01492 | GR00423 | 6133 | 5330 |
| 661 | 662 | RXN01518 | VV0008 | 23238 | 23711 |
| 663 | 664 | F RXA01518 | GR00424 | 23238 | 23711 |
| 665 | 666 | RXN01549 | VV0080 | 46 | 1704 |
| 667 | 668 | F RXA01549 | GR00430 | 8426 | 7566 |
| 669 | 670 | F RXA02011 | GR00603 | 46 | 363 |
| 671 | 672 | RXN01557 | VV0323 | 959 | 1774 |
| 673 | 674 | F RXA01557 | GR00433 | 959 | 1774 |
| 675 | 676 | RXN01574 | VV0009 | 48980 | 47946 |
| 677 | 678 | F RXA01574 | GR00438 | 6963 | 5929 |
| 679 | 680 | RXN01589 | VV0227 | 1216 | 197 |
| 681 | 682 | RXN01592 | VV0229 | 14706 | 13405 |
| 683 | 684 | F RXA01592 | GR00447 | 3 | 1295 |
| 685 | 686 | RXN01597 | VV0229 | 8480 | 7299 |
| 687 | 688 | F RXA01597 | GR00447 | 6220 | 7401 |
| 689 | 690 | RXN01598 | VV0229 | 7286 | 6324 |
| 691 | 692 | F RXA01598 | GR00447 | 7414 | 8376 |
| 693 | 694 | RXN01618 | VV0050 | 23629 | 23246 |
| 695 | 696 | F RXA01618 | GR00451 | 1387 | 1004 |
| 697 | 698 | RXN01634 | VV0050 | 43466 | 42915 |
| 699 | 700 | F RXA01634 | GR00454 | 4988 | 5539 |
| 701 | 702 | RXN01635 | VV0050 | 42879 | 42139 |
| 703 | 704 | F RXA01635 | GR00454 | 5575 | 6315 |
| 705 | 706 | RXN01647 | VV0005 | 43276 | 44445 |
| 707 | 708 | F RXA01647 | GR00456 | 12422 | 11535 |
| 709 | 710 | RXN01658 | VV0010 | 44183 | 42351 |
| 711 | 712 | F RXA01658 | GR00461 | 5 | 1489 |
| 713 | 714 | RXN01659 | VV0089 | 5059 | 5604 |
| 715 | 716 | F RXA01659 | GR00462 | 3 | 488 |
| 717 | 718 | RXN01663 | VV0089 | 4271 | 5128 |
| 719 | 720 | F RXA01663 | GR00463 | 438 | 4 |
| 721 | 722 | RXN01669 | VV0057 | 4529 | 5443 |
| 723 | 724 | F RXA01669 | GR00465 | 1002 | 271 |
| 725 | 726 | RXN01672 | VV0179 | 7849 | 8190 |
| 727 | 728 | F RXA01672 | GR00467 | 2 | 310 |
| 729 | 730 | RXN01694 | VV0139 | 13054 | 13953 |
| 731 | 732 | F RXA01694 | GR00474 | 3931 | 3032 |
| 733 | 734 | RXN01696 | VV0115 | 1381 | 203 |
| 735 | 736 | F RXA01696 | GR00475 | 799 | 203 |
| 737 | 738 | RXN01697 | VV0139 | 1581 | 625 |
| 739 | 740 | F RXA01697 | GR00476 | 761 | 1486 |
| 741 | 742 | RXN01701 | VV0162 | 375 | 4 |
| 743 | 744 | F RXA01701 | GR00478 | 196 | 528 |
| 745 | 746 | RXN01703 | VV0089 | 7108 | 8220 |
| 747 | 748 | F RXA01703 | GR00479 | 2118 | 1648 |
| 749 | 750 | RXN01709 | VV0022 | 847 | 416 |
| 751 | 752 | F RXA01709 | GR00483 | 745 | 416 |
| 753 | 754 | RXN01711 | VV0191 | 8153 | 6996 |
| 755 | 756 | F RXA01711 | GR00484 | 2007 | 850 |
| 757 | 758 | RXN01721 | VV0036 | 1026 | 4 |
| 759 | 760 | RXN01734 | VV0221 | 1251 | 1784 |
| 761 | 762 | F RXA01734 | GR00492 | 544 | 1077 |
| 763 | 764 | RXN01742 | VV0233 | 5246 | 4743 |
| 765 | 766 | F RXA01742 | GR00493 | 7614 | 8117 |
| 767 | 768 | RXN01754 | VV0127 | 38790 | 36850 |
| 769 | 770 | F RXA01754 | GR00497 | 4082 | 2142 |
| 771 | 772 | RXN01761 | VV0010 | 11968 | 7505 |
| 773 | 774 | F RXA00739 | GR00202 | 819 | 4 |
| 775 | 776 | F RXA01587 | GR00442 | 120 | 2102 |
| 777 | 778 | F RXA01761 | GR00499 | 7001 | 5484 |
| 779 | 780 | RXN01765 | VV0054 | 17190 | 18131 |
| 781 | 782 | F RXA01765 | GR00500 | 3144 | 4085 |
| 783 | 784 | RXN01767 | VV0015 | 55242 | 55706 |
| 785 | 786 | F RXA01767 | GR00501 | 341 | 6 |
| 787 | 788 | RXN01769 | VV0015 | 54296 | 54736 |
| 789 | 790 | F RXA01769 | GR00501 | 1275 | 847 |
| 791 | 792 | RXN01771 | VV0050 | 35063 | 35764 |
| 793 | 794 | F RXA01771 | GR00502 | 886 | 185 |
| 795 | 796 | RXN01774 | VV0015 | 1794 | 2519 |
| 797 | 798 | F RXA01774 | GR00503 | 634 | 1416 |
| 799 | 800 | RXN01787 | VV0039 | 256 | 948 |
| 801 | 802 | F RXA01787 | GR00506 | 2 | 355 |
| 803 | 804 | RXN01796 | VV0137 | 2070 | 2843 |
| 805 | 806 | F RXA01796 | GR00508 | 2 | 484 |
| 807 | 808 | RXN01803 | VV0216 | 3355 | 4314 |
| 809 | 810 | F RXA01803 | GR00509 | 5671 | 4712 |
| 811 | 812 | RXN01809 | VV0081 | 9171 | 10346 |
| 813 | 814 | F RXA01062 | GR00297 | 490 | 5 |
| 815 | 816 | F RXA01809 | GR00510 | 3 | 638 |
| 817 | 818 | RXN01811 | VV0146 | 1243 | 1923 |
| 819 | 820 | RXN01813 | VV0084 | 46618 | 45953 |
| 821 | 822 | F RXA01813 | GR00515 | 635 | 6 |
| 823 | 824 | RXN01815 | VV0084 | 49277 | 50068 |
| 825 | 826 | F RXA01815 | GR00515 | 3294 | 4085 |
| 827 | 828 | RXN01825 | VV0083 | 2847 | 2578 |
| 829 | 830 | F RXA01825 | GR00516 | 2847 | 2578 |
| 831 | 832 | RXN01831 | VV0083 | 10874 | 10413 |
| 833 | 834 | F RXA01831 | GR00516 | 10874 | 10413 |
| 835 | 836 | RXN01834 | VV0143 | 11244 | 11945 |
| 837 | 838 | F RXA01834 | GR00517 | 2478 | 1777 |
| 839 | 840 | RXN01846 | VV0010 | 287 | 6 |
| 841 | 842 | F RXA01846 | GR00523 | 261 | 4 |
| 843 | 844 | RXN01847 | VV0139 | 19018 | 18284 |
| 845 | 846 | F RXA01847 | GR00524 | 52 | 786 |
| 847 | 848 | RXN01874 | VV0248 | 352 | 5 |
| 849 | 850 | F RXA01874 | GR00535 | 2556 | 2903 |
| 851 | 852 | RXN01875 | VV0145 | 2894 | 2049 |
| 853 | 854 | F RXA01875 | GR00536 | 516 | 1313 |
| 855 | 856 | F RXA02734 | GR00762 | 6514 | 6897 |
| 857 | 858 | RXN01877 | VV0105 | 3493 | 2423 |
| 859 | 860 | F RXA01877 | GR00537 | 135 | 1199 |
| 861 | 862 | RXN01879 | VV0105 | 1505 | 573 |
| 863 | 864 | F RXA01879 | GR00537 | 2117 | 2704 |
| 865 | 866 | F RXA01880 | GR00537 | 2641 | 3048 |
| 867 | 868 | RXN01896 | VV0098 | 75888 | 76523 |
| 869 | 870 | F RXA01896 | GR00544 | 2 | 580 |
| 871 | 872 | RXN01899 | VV0098 | 77817 | 78602 |
| 873 | 874 | F RXA01899 | GR00544 | 1874 | 2659 |
| 875 | 876 | RXN01902 | VV0098 | 84095 | 83037 |
| 877 | 878 | F RXA01902 | GR00544 | 7957 | 7094 |
| 879 | 880 | RXN01908 | VV0187 | 4030 | 4875 |
| 881 | 882 | F RXA01908 | GR00545 | 4030 | 4512 |
| 883 | 884 | RXN01909 | VV0218 | 69 | 947 |
| 885 | 886 | F RXA01909 | GR00546 | 59 | 937 |
| 887 | 888 | RXN01910 | VV0218 | 1040 | 1885 |
| 889 | 890 | F RXA01910 | GR00546 | 1030 | 1875 |
| 891 | 892 | RXN01911 | VV0218 | 2209 | 3147 |
| 893 | 894 | F RXA01911 | GR00546 | 2199 | 3044 |
| 895 | 896 | RXN01930 | VV0127 | 46545 | 47495 |
| 897 | 898 | F RXA01930 | GR00555 | 3817 | 2867 |
| 899 | 900 | RXN01944 | VV0050 | 42128 | 41157 |
| 901 | 902 | F RXA01944 | GR00558 | 2 | 385 |
| 903 | 904 | F RXA01636 | GR00454 | 6326 | 6898 |
| 905 | 906 | RXN01945 | VV0050 | 41150 | 39159 |
| 907 | 908 | F RXA01945 | GR00558 | 392 | 1633 |
| 909 | 910 | F RXA01627 | GR00453 | 1 | 495 |
| 911 | 912 | RXN01960 | VV0200 | 2259 | 1942 |
| 913 | 914 | F RXA01960 | GR00565 | 187 | 504 |
| 915 | 916 | RXN01985 | VV0056 | 1331 | 282 |
| 917 | 918 | RXN01987 | VV0149 | 167 | 379 |
| 919 | 920 | F RXA01987 | GR00576 | 167 | 379 |
| 921 | 922 | RXN01988 | VV0149 | 887 | 462 |
| 923 | 924 | F RXA01988 | GR00576 | 779 | 462 |
| 925 | 926 | RXN01991 | VV0230 | 926 | 1798 |
| 927 | 928 | F RXA01991 | GR00581 | 926 | 1720 |
| 929 | 930 | RXN01996 | VV0174 | 28434 | 27898 |
| 931 | 932 | F RXA01996 | GR00585 | 88 | 624 |
| 933 | 934 | RXN02007 | VV0324 | 855 | 223 |
| 935 | 936 | F RXA02007 | GR00598 | 651 | 223 |
| 937 | 938 | RXN02014 | VV0137 | 8298 | 8804 |
| 939 | 940 | F RXA02014 | GR00607 | 935 | 540 |
| 941 | 942 | RXN02019 | VV0129 | 44705 | 44205 |
| 943 | 944 | F RXA02019 | GR00612 | 597 | 106 |
| 945 | 946 | RXN02023 | VV0160 | 3234 | 4001 |
| 947 | 948 | F RXA02023 | GR00613 | 3234 | 4001 |
| 949 | 950 | RXN02032 | VV0117 | 5181 | 5750 |
| 951 | 952 | F RXA02032 | GR00618 | 4160 | 4729 |
| 953 | 954 | RXN02039 | VV0190 | 1482 | 643 |
| 955 | 956 | F RXA02039 | GR00621 | 3 | 812 |
| 957 | 958 | RXN02044 | VV0025 | 17208 | 15826 |
| 959 | 960 | RXN02045 | VV0025 | 15823 | 15563 |
| 961 | 962 | F RXA02045 | GR00623 | 1913 | 2173 |
| 963 | 964 | RXN02049 | VV0009 | 35549 | 36157 |
| 965 | 966 | F RXA02049 | GR00624 | 1583 | 2029 |
| 967 | 968 | RXN02050 | VV0009 | 36003 | 36797 |
| 969 | 970 | F RXA02050 | GR00624 | 2462 | 2833 |
| 971 | 972 | RXN02059 | VV0222 | 10306 | 10800 |
| 973 | 974 | F RXA02059 | GR00625 | 4678 | 4184 |
| 975 | 976 | RXN02066 | VV0222 | 6187 | 6678 |
| 977 | 978 | F RXA02066 | GR00626 | 6187 | 6678 |
| 979 | 980 | RXN02067 | VV0222 | 6733 | 7188 |
| 981 | 982 | F RXA02067 | GR00626 | 6733 | 7188 |
| 983 | 984 | RXN02075 | VV0318 | 12990 | 13778 |
| 985 | 986 | RXN02076 | VV0318 | 13879 | 14412 |
| 987 | 988 | F RXA02076 | GR00628 | 6902 | 7435 |
| 989 | 990 | RXN02094 | VV0126 | 18268 | 18984 |
| 991 | 992 | F RXA02094 | GR00629 | 13282 | 13998 |
| 993 | 994 | RXN02104 | VV0318 | 7435 | 6314 |
| 995 | 996 | F RXA02104 | GR00631 | 5327 | 4908 |
| 997 | 998 | F RXA02071 | GR00628 | 458 | 6 |
| 999 | 1000 | RXN02107 | VV0123 | 21585 | 21244 |
| 1001 | 1002 | F RXA02107 | GR00632 | 1536 | 1877 |
| 1003 | 1004 | RXN02108 | VV0123 | 21217 | 20609 |
| 1005 | 1006 | F RXA02108 | GR00632 | 2077 | 2511 |
| 1007 | 1008 | RXN02114 | VV0180 | 3 | |
| 1009 | 1010 | F RXA02114 | GR00634 | 615 | 130 |
| 1011 | 1012 | RXN02121 | VV0102 | 12833 | 12129 |
| 1013 | 1014 | F RXA02121 | GR00636 | 5813 | 5109 |
| 1015 | 1016 | RXN02138 | VV0300 | 4409 | 4750 |
| 1017 | 1018 | F RXA02138 | GR00639 | 4409 | 4750 |
| 1019 | 1020 | RXN02151 | VV0300 | 19913 | 21100 |
| 1021 | 1022 | F RXA02151 | GR00639 | 19913 | 21100 |
| 1023 | 1024 | RXN02169 | VV0100 | 3172 | 4017 |
| 1025 | 1026 | F RXA02169 | GR00641 | 3172 | 4017 |
| 1027 | 1028 | RXN02180 | VV0100 | 16813 | 15356 |
| 1029 | 1030 | F RXA02180 | GR00641 | 16813 | 15356 |
| 1031 | 1032 | RXN02185 | VV0100 | 20185 | 20763 |
| 1033 | 1034 | F RXA02185 | GR00641 | 20185 | 20763 |
| 1035 | 1036 | RXN02186 | VV0100 | 21192 | 20995 |
| 1037 | 1038 | F RXA02186 | GR00641 | 21213 | 20995 |
| 1039 | 1040 | RXN02207 | VV0302 | 802 | 5 |
| 1041 | 1042 | F RXA02207 | GR00646 | 10909 | 11667 |
| 1043 | 1044 | RXN02223 | VV0308 | 2732 | 3232 |
| 1045 | 1046 | F RXA02223 | GR00652 | 425 | 6 |
| 1047 | 1048 | RXN02226 | VV0068 | 1059 | 4 |
| 1049 | 1050 | F RXA02226 | GR00653 | 1059 | 4 |
| 1051 | 1052 | RXN02238 | VV0204 | 1345 | 1629 |
| 1053 | 1054 | F RXA02238 | GR00654 | 5241 | 5525 |
| 1055 | 1056 | RXN02254 | VV0202 | 2 | |
| 1057 | 1058 | F RXA02254 | GR00654 | 21769 | 22449 |
| 1059 | 1060 | RXN02271 | VV0020 | 14281 | 14838 |
| 1061 | 1062 | F RXA02271 | GR00655 | 5406 | 5963 |
| 1063 | 1064 | RXN02279 | VV0020 | 236 | 1693 |
| 1065 | 1066 | F RXA02279 | GR00657 | 1 | 1404 |
| 1067 | 1068 | RXN02296 | VV0127 | 24138 | 24626 |
| 1069 | 1070 | F RXA02296 | GR00662 | 6978 | 7466 |
| 1071 | 1072 | RXN02300 | VV0127 | 28354 | 28022 |
| 1073 | 1074 | F RXA02300 | GR00662 | 11194 | 10862 |
| 1075 | 1076 | RXN02301 | VV0127 | 29070 | 28354 |
| 1077 | 1078 | F RXA02301 | GR00662 | 11910 | 11194 |
| 1079 | 1080 | RXN02302 | VV0127 | 29196 | 30074 |
| 1081 | 1082 | F RXA02302 | GR00662 | 12036 | 12800 |
| 1083 | 1084 | RXN02303 | VV0127 | 13326 | 14231 |
| 1085 | 1086 | F RXA02303 | GR00663 | 1 | 720 |
| 1087 | 1088 | RXN02307 | VV0127 | 12611 | 11991 |
| 1089 | 1090 | F RXA02307 | GR00664 | 395 | 6 |
| 1091 | 1092 | RXN02314 | VV0025 | 23092 | 23532 |
| 1093 | 1094 | F RXA02314 | GR00665 | 6379 | 5939 |
| 1095 | 1096 | RXN02337 | VV0141 | 4679 | 3357 |
| 1097 | 1098 | F RXA02337 | GR00672 | 2893 | 3816 |
| 1099 | 1100 | RXN02339 | VV0195 | 1 | |
| 1101 | 1102 | F RXA02339 | GR00674 | 1 | 492 |
| 1103 | 1104 | RXN02340 | VV0195 | 1640 | 576 |
| 1105 | 1106 | F RXA02338 | GR00673 | 484 | 5 |
| 1107 | 1108 | F RXA02340 | GR00674 | 1214 | 576 |
| 1109 | 1110 | RXN02341 | VV0078 | 4279 | 4764 |
| 1111 | 1112 | F RXA02341 | GR00675 | 415 | 5 |
| 1113 | 1114 | RXN02360 | VV0051 | 14638 | 12206 |
| 1115 | 1116 | F RXA02360 | GR00685 | 3644 | 6076 |
| 1117 | 1118 | RXN02361 | VV0051 | 12122 | 11472 |
| 1119 | 1120 | F RXA02361 | GR00685 | 6160 | 6810 |
| 1121 | 1122 | RXN02367 | VV0102 | 4639 | 5247 |
| 1123 | 1124 | F RXA02367 | GR00687 | 2162 | 1554 |
| 1125 | 1126 | RXN02368 | VV0102 | 3883 | 4557 |
| 1127 | 1128 | F RXA02368 | GR00687 | 2918 | 2244 |
| 1129 | 1130 | RXN02381 | VV0213 | 3765 | 2743 |
| 1131 | 1132 | F RXA02381 | GR00691 | 1792 | 770 |
| 1133 | 1134 | RXN02383 | VV0213 | 639 | 4 |
| 1135 | 1136 | F RXA02383 | GR00692 | 608 | 6 |
| 1137 | 1138 | RXN02387 | VV0176 | 2729 | 3490 |
| 1139 | 1140 | F RXA02387 | GR00694 | 683 | 6 |
| 1141 | 1142 | RXN02398 | VV0176 | 12750 | 11149 |
| 1143 | 1144 | F RXA02398 | GR00698 | 2841 | 4370 |
| 1145 | 1146 | RXN02406 | VV0084 | 22016 | 22564 |
| 1147 | 1148 | F RXA02406 | GR00701 | 1322 | 774 |
| 1149 | 1150 | RXN02407 | VV0084 | 21758 | 21387 |
| 1151 | 1152 | F RXA02407 | GR00701 | 1580 | 1885 |
| 1153 | 1154 | RXN02408 | VV0084 | 20832 | 19921 |
| 1155 | 1156 | F RXA02408 | GR00702 | 832 | 5 |
| 1157 | 1158 | RXN02409 | VV0084 | 21371 | 20835 |
| 1159 | 1160 | F RXA02409 | GR00702 | 1248 | 835 |
| 1161 | 1162 | RXN02428 | VV0110 | 4585 | 3452 |
| 1163 | 1164 | F RXA02428 | GR00707 | 4585 | 3452 |
| 1165 | 1166 | RXN02454 | VV0196 | 2810 | 1569 |
| 1167 | 1168 | F RXA02454 | GR00711 | 3 | 815 |
| 1169 | 1170 | RXN02457 | VV0124 | 19193 | 18084 |
| 1171 | 1172 | F RXA02457 | GR00712 | 1295 | 2404 |
| 1173 | 1174 | RXN02460 | VV0124 | 14649 | 15152 |
| 1175 | 1176 | F RXA02460 | GR00712 | 5839 | 5336 |
| 1177 | 1178 | RXN02464 | VV0211 | 1990 | 3189 |
| 1179 | 1180 | F RXA02464 | GR00713 | 1107 | 1613 |
| 1181 | 1182 | RXN02465 | VV0211 | 3590 | 3192 |
| 1183 | 1184 | F RXA02465 | GR00713 | 2014 | 1616 |
| 1185 | 1186 | RXN02466 | VV0211 | 92 | 6 |
| 1187 | 1188 | F RXA02466 | GR00714 | 92 | 6 |
| 1189 | 1190 | RXN02505 | VV0007 | 23969 | 24139 |
| 1191 | 1192 | F RXA02505 | GR00720 | 18423 | 18593 |
| 1193 | 1194 | RXN02510 | VV0171 | 17467 | 16832 |
| 1195 | 1196 | F RXA02510 | GR00721 | 1983 | 2618 |
| 1197 | 1198 | RXN02519 | VV0183 | 2709 | 4337 |
| 1199 | 1200 | F RXA02519 | GR00724 | 1933 | 128 |
| 1201 | 1202 | RXN02520 | VV0183 | 2243 | 1560 |
| 1203 | 1204 | F RXA02520 | GR00724 | 2222 | 2905 |
| 1205 | 1206 | RXN02534 | VV0057 | 11192 | 11995 |
| 1207 | 1208 | F RXA02534 | GR00726 | 5536 | 6339 |
| 1209 | 1210 | RXN02537 | VV0057 | 14617 | 15078 |
| 1211 | 1212 | F RXA02537 | GR00726 | 8961 | 9422 |
| 1213 | 1214 | RXN02538 | VV0057 | 15078 | 15749 |
| 1215 | 1216 | F RXA02538 | GR00726 | 9422 | 10093 |
| 1217 | 1218 | RXN02555 | VV0101 | 5340 | 4738 |
| 1219 | 1220 | F RXA02555 | GR00731 | 1757 | 1155 |
| 1221 | 1222 | RXN02564 | VV0154 | 10016 | 9015 |
| 1223 | 1224 | F RXA02564 | GR00732 | 2543 | 3217 |
| 1225 | 1226 | RXN02568 | VV0245 | 1657 | 5 |
| 1227 | 1228 | F RXA02568 | GR00735 | 1363 | 5 |
| 1229 | 1230 | RXN02593 | VV0098 | 11073 | 11669 |
| 1231 | 1232 | F RXA02593 | GR00741 | 18693 | 18481 |
| 1233 | 1234 | F RXA02594 | GR00741 | 19077 | 18754 |
| 1235 | 1236 | RXN02606 | VV0098 | 34557 | 35927 |
| 1237 | 1238 | F RXA02606 | GR00742 | 13514 | 12144 |
| 1239 | 1240 | RXN02610 | VV0098 | 31620 | 30694 |
| 1241 | 1242 | F RXA02610 | GR00742 | 16452 | 17378 |
| 1243 | 1244 | RXN02624 | VV0129 | 29202 | 30497 |
| 1245 | 1246 | F RXA02624 | GR00746 | 5602 | 4889 |
| 1247 | 1248 | RXN02626 | VV0314 | 2012 | 1008 |
| 1249 | 1250 | RXN02656 | VV0090 | 15756 | 14917 |
| 1251 | 1252 | RXN02673 | VV0315 | 14030 | 13398 |
| 1253 | 1254 | F RXA02673 | GR00753 | 14030 | 13398 |
| 1255 | 1256 | RXN02680 | VV0098 | 64917 | 66200 |
| 1257 | 1258 | F RXA02680 | GR00754 | 6392 | 5109 |
| 1259 | 1260 | F RXA02679 | GR00754 | 5268 | 5693 |
| 1261 | 1262 | F RXA02681 | GR00754 | 5751 | 6194 |
| 1263 | 1264 | RXN02693 | VV0098 | 74100 | 75875 |
| 1265 | 1266 | F RXA02693 | GR00755 | 1650 | 4 |
| 1267 | 1268 | RXN02696 | VV0017 | 7946 | 7491 |
| 1269 | 1270 | F RXA02696 | GR00756 | 742 | 287 |
| 1271 | 1272 | RXN02697 | VV0017 | 31257 | 32783 |
| 1273 | 1274 | F RXA02697 | GR00757 | 1 | 699 |
| 1275 | 1276 | F RXA02719 | GR00758 | 19598 | 20245 |
| 1277 | 1278 | RXN02720 | VV0017 | 8727 | 8026 |
| 1279 | 1280 | F RXA02720 | GR00759 | 631 | 5 |
| 1281 | 1282 | RXN02744 | VV0074 | 893 | 1696 |
| 1283 | 1284 | F RXA02744 | GR00763 | 14460 | 13657 |
| 1285 | 1286 | RXN02770 | VV0171 | 4202 | 2637 |
| 1287 | 1288 | F RXA02770 | GR00772 | 3 | 1322 |
| 1289 | 1290 | RXN02781 | VV0084 | 14566 | 13376 |
| 1291 | 1292 | F RXA02781 | GR00774 | 1345 | 155 |
| 1293 | 1294 | RXN02782 | VV0093 | 7148 | 8446 |
| 1295 | 1296 | F RXA02782 | GR00775 | 204 | 875 |
| 1297 | 1298 | RXN02812 | VV0210 | 342 | 4 |
| 1299 | 1300 | F RXA02812 | GR00793 | 2 | 568 |
| 1301 | 1302 | RXN02817 | VV0346 | 403 | 5 |
| 1303 | 1304 | F RXA02817 | GR00798 | 403 | 5 |
| 1305 | 1306 | RXN02818 | VV0347 | 611 | 6 |
| 1307 | 1308 | F RXA02818 | GR00799 | 611 | 6 |
| 1309 | 1310 | RXN02825 | VV0082 | 3589 | 1751 |
| 1311 | 1312 | F RXA01322 | GR00385 | 443 | 6 |
| 1313 | 1314 | F RXA02824 | GR00805 | 531 | 4 |
| 1315 | 1316 | F RXA02825 | GR00806 | 565 | 182 |
| 1317 | 1318 | RXN02838 | VV0161 | 1 | |
| 1319 | 1320 | F RXA02838 | GR00831 | 1 | 462 |
| 1321 | 1322 | RXN02840 | VV0365 | 488 | 339 |
| 1323 | 1324 | F RXA02840 | GR00835 | 488 | 339 |
| 1325 | 1326 | RXN02841 | VV0055 | 11788 | 12222 |
| 1327 | 1328 | F RXA02841 | GR00840 | 283 | 5 |
| 1329 | 1330 | RXN02846 | VV0127 | 30861 | 30112 |
| 1331 | 1332 | F RXA02846 | GR00845 | 578 | 6 |
| 1333 | 1334 | RXN02847 | VV0113 | 47 | 1135 |
| 1335 | 1336 | F RXA02847 | GR00847 | 598 | 5 |
| 1337 | 1338 | RXN02849 | VV0237 | 2 | |
| 1339 | 1340 | F RXA02849 | GR00849 | 2 | 283 |
| 1341 | 1342 | RXN02911 | VV0135 | 24643 | 25101 |
| 1343 | 1344 | RXN02914 | VV0127 | 17305 | 16763 |
| 1345 | 1346 | RXN02921 | VV0213 | 1871 | 1401 |
| 1347 | 1348 | RXN02924 | VV0088 | 4557 | 5105 |
| 1349 | 1350 | RXN02927 | VV0082 | 18836 | 19303 |
| 1351 | 1352 | RXN02928 | VV0082 | 19511 | 20203 |
| 1353 | 1354 | RXN02931 | VV0090 | 25420 | 25644 |
| 1355 | 1356 | RXN02932 | VV0176 | 23391 | 24362 |
| 1357 | 1358 | RXN02934 | VV0103 | 14533 | 14838 |
| 1359 | 1360 | RXN02936 | VV0197 | 24360 | 24557 |
| 1361 | 1362 | RXN02939 | VV0008 | 33988 | 32387 |
| 1363 | 1364 | F RXA01383 | GR00406 | 1147 | 5 |
| 1365 | 1366 | RXN02950 | VV0224 | 7629 | 7306 |
| 1367 | 1368 | RXN02951 | VV0176 | 5739 | 5131 |
| 1369 | 1370 | RXN02957 | VV0020 | 30448 | 30158 |
| 1371 | 1372 | RXN02967 | VV0318 | 6614 | 6931 |
| 1373 | 1374 | RXN02971 | VV0210 | 951 | 640 |
| 1375 | 1376 | RXN02978 | VV0010 | 2191 | 683 |
| 1377 | 1378 | RXN02995 | VV0069 | 348 | 1913 |
| 1379 | 1380 | RXN02997 | VV0069 | 3709 | 2981 |
| 1381 | 1382 | RXN03001 | VV0170 | 422 | 874 |
| 1383 | 1384 | RXN03005 | VV0237 | 1101 | 334 |
| 1385 | 1386 | RXN03009 | VV0238 | 353 | 6 |
| 1387 | 1388 | RXN03010 | VV0238 | 7435 | 7199 |
| 1389 | 1390 | RXN03011 | VV0098 | 2984 | 3184 |
| 1391 | 1392 | RXN03012 | VV0241 | 2 | 571 |
| 1393 | 1394 | RXN03017 | VV0218 | 5720 | 7258 |
| 1395 | 1396 | F RXA02753 | GR00765 | 2630 | 138 |
| 1397 | 1398 | RXN03018 | VV0218 | 7221 | 8213 |
| 1399 | 1400 | RXN03024 | VV0003 | 6315 | 7730 |
| 1401 | 1402 | RXN03025 | VV0003 | 8668 | 7796 |
| 1403 | 1404 | RXN03027 | VV0008 | 17 | 151 |
| 1405 | 1406 | RXN03029 | VV0009 | 95 | 607 |
| 1407 | 1408 | RXN03031 | VV0011 | 1 | 789 |
| 1409 | 1410 | RXN03032 | VV0012 | 3652 | 3936 |
| 1411 | 1412 | RXN03034 | VV0013 | 2 | 661 |
| 1413 | 1414 | F RXA00063 | GR00010 | 1658 | 1374 |
| 1415 | 1416 | RXN03037 | VV0015 | 5364 | 5549 |
| 1417 | 1418 | RXN03041 | VV0018 | 1770 | 1273 |
| 1419 | 1420 | F RXA02892 | GR10035 | 1171 | 668 |
| 1421 | 1422 | RXN03045 | VV0019 | 33044 | 34039 |
| 1423 | 1424 | RXN03046 | VV0020 | 1 | 336 |
| 1425 | 1426 | RXN03047 | VV0020 | 25070 | 26485 |
| 1427 | 1428 | F RXA00036 | GR00004 | 7204 | 8619 |
| 1429 | 1430 | RXN03048 | VV0020 | 27423 | 26551 |
| 1431 | 1432 | F RXA00037 | GR00004 | 9557 | 8685 |
| 1433 | 1434 | RXN03050 | VV0021 | 6368 | 7333 |
| 1435 | 1436 | RXN03053 | VV0026 | 12 | 1535 |
| 1437 | 1438 | F RXA02885 | GR10021 | 1 | 1536 |
| 1439 | 1440 | RXN03055 | VV0026 | 3519 | 3947 |
| 1441 | 1442 | F RXA00261 | GR00039 | 11693 | 11265 |
| 1443 | 1444 | F RXA02888 | GR10024 | 326 | 754 |
| 1445 | 1446 | RXN03059 | VV0030 | 5373 | 4894 |
| 1447 | 1448 | F RXA02899 | GR10040 | 2125 | 1646 |
| 1449 | 1450 | RXN03062 | VV0035 | 525 | 4 |
| 1451 | 1452 | RXN03066 | VV0038 | 7298 | 6636 |
| 1453 | 1454 | F RXA02876 | GR10016 | 405 | 1067 |
| 1455 | 1456 | RXN03067 | VV0038 | 7493 | 7323 |
| 1457 | 1458 | RXN03068 | VV0038 | 7648 | 7529 |
| 1459 | 1460 | RXN03073 | VV0042 | 1573 | 944 |
| 1461 | 1462 | F RXA02905 | GR10044 | 477 | 4 |
| 1463 | 1464 | RXN03085 | VV0048 | 4511 | 4161 |
| 1465 | 1466 | RXN03089 | VV0053 | 1183 | 26 |
| 1467 | 1468 | F RXA00071 | GR00011 | 4013 | 5464 |
| 1469 | 1470 | RXN03098 | VV0064 | 2100 | 2723 |
| 1471 | 1472 | RXN03099 | VV0064 | 5576 | 6250 |
| 1473 | 1474 | RXN03104 | VV0071 | 401 | 577 |
| 1475 | 1476 | RXN03106 | VV0074 | 15930 | 16121 |
| 1477 | 1478 | RXN03107 | VV0076 | 232 | 432 |
| 1479 | 1480 | RXN03113 | VV0086 | 6541 | 8139 |
| 1481 | 1482 | F RXA00506 | GR00126 | 489 | 1829 |
| 1483 | 1484 | RXN03115 | VV0089 | 148 | 546 |
| 1485 | 1486 | RXN03122 | VV0104 | 3329 | 3475 |
| 1487 | 1488 | RXN03134 | VV0127 | 65312 | 65662 |
| 1489 | 1490 | RXN03135 | VV0127 | 66674 | 67402 |
| 1491 | 1492 | F RXA02285 | GR00660 | 1544 | 2272 |
| 1493 | 1494 | RXN03138 | VV0129 | 21194 | 21664 |
| 1495 | 1496 | RXN03140 | VV0131 | 4550 | 4302 |
| 1497 | 1498 | RXN03141 | VV0135 | 31144 | 31473 |
| 1499 | 1500 | RXN03146 | VV0143 | 25998 | 26468 |
| 1501 | 1502 | RXN03147 | VV0144 | 2726 | 2977 |
| 1503 | 1504 | RXN03149 | VV0146 | 969 | 1235 |
| 1505 | 1506 | RXN03152 | VV0166 | 264 | 536 |
| 1507 | 1508 | RXN03153 | VV0176 | 46481 | 47044 |
| 1509 | 1510 | RXN03154 | VV0179 | 1328 | 2239 |
| 1511 | 1512 | RXN03156 | VV0187 | 4908 | 5087 |
| 1513 | 1514 | F RXA00176 | GR00027 | 3475 | 3317 |
| 1515 | 1516 | RXN03162 | VV0195 | 909 | 1304 |
| 1517 | 1518 | RXN03167 | VV0327 | 633 | 4 |
| 1519 | 1520 | F RXA02862 | GR10006 | 1695 | 2330 |
| 1521 | 1522 | RXN03170 | VV0328 | 457 | 209 |
| 1523 | 1524 | F RXA02856 | GR10003 | 459 | 211 |
| 1525 | 1526 | RXN03172 | VV0329 | 1392 | 367 |
| 1527 | 1528 | F RXA02858 | GR10004 | 1392 | 367 |
| 1529 | 1530 | RXN03173 | VV0330 | 1340 | 243 |
| 1531 | 1532 | F RXA02874 | GR10015 | 1348 | 869 |
| 1533 | 1534 | RXN03174 | VV0331 | 461 | 6 |
| 1535 | 1536 | F RXA02884 | GR10020 | 1695 | 2156 |
| 1537 | 1538 | RXN03177 | VV0333 | 816 | 151 |
| 1539 | 1540 | F RXA02881 | GR10019 | 94 | 759 |
| 1541 | 1542 | RXN03182 | VV0339 | 276 | 4 |
| 1543 | 1544 | RXN03184 | VV0374 | 517 | 20 |
| 1545 | 1546 | RXN03185 | VV0375 | 311 | 123 |
| 1547 | 1548 | RXA00003 | GR00001 | 2279 | 3019 |
| 1549 | 1550 | RXA00008 | GR00002 | 606 | 115 |
| 1551 | 1552 | RXA00015 | GR00002 | 5999 | 6307 |
| 1553 | 1554 | RXA00018 | GR00002 | 12979 | 14277 |
| 1555 | 1556 | RXA00020 | GR00002 | 17142 | 16363 |
| 1557 | 1558 | RXA00021 | GR00002 | 18766 | 20538 |
| 1559 | 1560 | RXA00025 | GR00003 | 2211 | 3647 |
| 1561 | 1562 | RXA00031 | GR00003 | 10383 | 9982 |
| 1563 | 1564 | RXA00049 | GR00008 | 2270 | 2956 |
| 1565 | 1566 | RXA00052 | GR00008 | 7957 | 7247 |
| 1567 | 1568 | RXA00054 | GR00008 | 8557 | 11469 |
| 1569 | 1570 | RXA00058 | GR00009 | 7394 | 6831 |
| 1571 | 1572 | RXA00059 | GR00009 | 8301 | 8020 |
| 1573 | 1574 | RXA00065 | GR00010 | 4140 | 4412 |
| 1575 | 1576 | RXA00068 | GR00011 | 1305 | 724 |
| 1577 | 1578 | RXA00079 | GR00012 | 6599 | 6820 |
| 1579 | 1580 | RXA00082 | GR00012 | 9019 | 8456 |
| 1581 | 1582 | RXA00083 | GR00013 | 771 | 1070 |
| 1583 | 1584 | RXA00093 | GR00014 | 204 | 2426 |
| 1585 | 1586 | RXA00101 | GR00014 | 10514 | 10107 |
| 1587 | 1588 | RXA00108 | GR00015 | 546 | 4 |
| 1589 | 1590 | RXA00110 | GR00016 | 364 | 912 |
| 1591 | 1592 | RXA00117 | GR00019 | 791 | 201 |
| 1593 | 1594 | RXA00118 | GR00019 | 918 | 1172 |
| 1595 | 1596 | RXA00119 | GR00019 | 1704 | 2462 |
| 1597 | 1598 | RXA00121 | GR00019 | 3473 | 4183 |
| 1599 | 1600 | RXA00122 | GR00019 | 4220 | 5842 |
| 1601 | 1602 | RXA00127 | GR00020 | 2871 | 2416 |
| 1603 | 1604 | RXA00134 | GR00021 | 1648 | 1079 |
| 1605 | 1606 | RXA00140 | GR00022 | 3841 | 3656 |
| 1607 | 1608 | RXA00141 | GR00022 | 4307 | 3846 |
| 1609 | 1610 | RXA00142 | GR00022 | 4776 | 4300 |
| 1611 | 1612 | RXA00150 | GR00023 | 4085 | 4858 |
| 1613 | 1614 | RXA00151 | GR00023 | 4956 | 5552 |
| 1615 | 1616 | RXA00153 | GR00023 | 7656 | 7231 |
| 1617 | 1618 | RXA00155 | GR00023 | 8615 | 9397 |
| 1619 | 1620 | RXA00159 | GR00024 | 3868 | 2687 |
| 1621 | 1622 | RXA00161 | GR00024 | 4893 | 5354 |
| 1623 | 1624 | RXA00169 | GR00026 | 5222 | 3150 |
| 1625 | 1626 | RXA00170 | GR00026 | 9914 | 8061 |
| 1627 | 1628 | RXA00173 | GR00027 | 1716 | 1384 |
| 1629 | 1630 | RXA00174 | GR00027 | 2079 | 1795 |
| 1631 | 1632 | RXA00175 | GR00027 | 2732 | 2103 |
| 1633 | 1634 | RXA00179 | GR00028 | 1714 | 1256 |
| 1635 | 1636 | RXA00180 | GR00028 | 2334 | 1795 |
| 1637 | 1638 | RXA00183 | GR00028 | 7344 | 8195 |
| 1639 | 1640 | RXA00185 | GR00028 | 9418 | 12045 |
| 1641 | 1642 | RXA00199 | GR00031 | 2172 | 754 |
| 1643 | 1644 | RXA00200 | GR00031 | 2837 | 2535 |
| 1645 | 1646 | RXA00207 | GR00032 | 6430 | 6747 |
| 1647 | 1648 | RXA00211 | GR00032 | 10120 | 10782 |
| 1649 | 1650 | RXA00218 | GR00032 | 18104 | 19243 |
| 1651 | 1652 | RXA00220 | GR00032 | 20666 | 20163 |
| 1653 | 1654 | RXA00230 | GR00034 | 746 | 27 |
| 1655 | 1656 | RXA00233 | GR00036 | 420 | 4 |
| 1657 | 1658 | RXA00234 | GR00036 | 998 | 459 |
| 1659 | 1660 | RXA00237 | GR00036 | 3668 | 4045 |
| 1661 | 1662 | RXA00238 | GR00036 | 4186 | 4554 |
| 1663 | 1664 | RXA00239 | GR00036 | 5118 | 4534 |
| 1665 | 1666 | RXA00240 | GR00036 | 5342 | 5133 |
| 1667 | 1668 | RXA00244 | GR00037 | 1565 | 930 |
| 1669 | 1670 | RXA00245 | GR00037 | 3049 | 1565 |
| 1671 | 1672 | RXA00248 | GR00037 | 7843 | 7121 |
| 1673 | 1674 | RXA00250 | GR00038 | 6 | 221 |
| 1675 | 1676 | RXA00252 | GR00038 | 485 | 727 |
| 1677 | 1678 | RXA00257 | GR00039 | 1760 | 2215 |
| 1679 | 1680 | RXA00258 | GR00039 | 3219 | 3890 |
| 1681 | 1682 | RXA00260 | GR00039 | 9234 | 10409 |
| 1683 | 1684 | RXA00273 | GR00042 | 185 | 1297 |
| 1685 | 1686 | RXA00274 | GR00042 | 1556 | 4165 |
| 1687 | 1688 | RXA00275 | GR00042 | 4696 | 4238 |
| 1689 | 1690 | RXA00276 | GR00042 | 5016 | 4675 |
| 1691 | 1692 | RXA00279 | GR00043 | 4001 | 2616 |
| 1693 | 1694 | RXA00282 | GR00044 | 793 | 5 |
| 1695 | 1696 | RXA00285 | GR00046 | 3 | 515 |
| 1697 | 1698 | RXA00286 | GR00046 | 579 | 1142 |
| 1699 | 1700 | RXA00294 | GR00047 | 2761 | 3189 |
| 1701 | 1702 | RXA00297 | GR00048 | 2861 | 3772 |
| 1703 | 1704 | RXA00320 | GR00057 | 358 | 537 |
| 1705 | 1706 | RXA00321 | GR00057 | 2411 | 597 |
| 1707 | 1708 | RXA00322 | GR00057 | 3658 | 2555 |
| 1709 | 1710 | RXA00325 | GR00057 | 8594 | 9238 |
| 1711 | 1712 | RXA00326 | GR00057 | 9378 | 9857 |
| 1713 | 1714 | RXA00336 | GR00057 | 19461 | 19931 |
| 1715 | 1716 | RXA00337 | GR00058 | 530 | 6 |
| 1717 | 1718 | RXA00339 | GR00059 | 817 | 1533 |
| 1719 | 1720 | RXA00349 | GR00066 | 3 | 1061 |
| 1721 | 1722 | RXA00355 | GR00069 | 635 | 510 |
| 1723 | 1724 | RXA00375 | GR00080 | 549 | 49 |
| 1725 | 1726 | RXA00380 | GR00082 | 836 | 216 |
| 1727 | 1728 | RXA00387 | GR00084 | 1403 | 591 |
| 1729 | 1730 | RXA00392 | GR00086 | 3890 | 3027 |
| 1731 | 1732 | RXA00394 | GR00086 | 5322 | 4990 |
| 1733 | 1734 | RXA00395 | GR00086 | 5417 | 5716 |
| 1735 | 1736 | RXA00396 | GR00086 | 6653 | 6183 |
| 1737 | 1738 | RXA00397 | GR00086 | 7206 | 6667 |
| 1739 | 1740 | RXA00398 | GR00087 | 1 | 681 |
| 1741 | 1742 | RXA00408 | GR00091 | 642 | 1088 |
| 1743 | 1744 | RXA00409 | GR00091 | 1088 | 2500 |
| 1745 | 1746 | RXA00411 | GR00092 | 1685 | 1011 |
| 1747 | 1748 | RXA00423 | GR00097 | 909 | 457 |
| 1749 | 1750 | RXA00424 | GR00097 | 1379 | 909 |
| 1751 | 1752 | RXA00425 | GR00097 | 1433 | 1657 |
| 1753 | 1754 | RXA00428 | GR00098 | 2657 | 2025 |
| 1755 | 1756 | RXA00429 | GR00098 | 3063 | 2662 |
| 1757 | 1758 | RXA00430 | GR00098 | 3473 | 3063 |
| 1759 | 1760 | RXA00433 | GR00100 | 1446 | 1970 |
| 1761 | 1762 | RXA00451 | GR00110 | 816 | 325 |
| 1763 | 1764 | RXA00457 | GR00114 | 1451 | 372 |
| 1765 | 1766 | RXA00462 | GR00116 | 3023 | 1644 |
| 1767 | 1768 | RXA00463 | GR00116 | 4209 | 3388 |
| 1769 | 1770 | RXA00468 | GR00118 | 1282 | 464 |
| 1771 | 1772 | RXA00469 | GR00119 | 1647 | 472 |
| 1773 | 1774 | RXA00472 | GR00119 | 5449 | 4589 |
| 1775 | 1776 | RXA00474 | GR00119 | 6575 | 8152 |
| 1777 | 1778 | RXA00475 | GR00119 | 8822 | 8163 |
| 1779 | 1780 | RXA00476 | GR00119 | 8961 | 9821 |
| 1781 | 1782 | RXA00481 | GR00119 | 17636 | 18220 |
| 1783 | 1784 | RXA00486 | GR00120 | 1 | 702 |
| 1785 | 1786 | RXA00490 | GR00121 | 2676 | 1774 |
| 1787 | 1788 | RXA00491 | GR00122 | 1057 | 638 |
| 1789 | 1790 | RXA00493 | GR00123 | 3 | 326 |
| 1791 | 1792 | RXA00519 | GR00132 | 4 | 516 |
| 1793 | 1794 | RXA00528 | GR00136 | 3562 | 4650 |
| 1795 | 1796 | RXA00529 | GR00136 | 5274 | 4732 |
| 1797 | 1798 | RXA00530 | GR00136 | 6837 | 5557 |
| 1799 | 1800 | RXA00535 | GR00137 | 5155 | 5871 |
| 1801 | 1802 | RXA00540 | GR00139 | 2027 | 2269 |
| 1803 | 1804 | RXA00549 | GR00143 | 502 | 897 |
| 1805 | 1806 | RXA00550 | GR00143 | 935 | 1255 |
| 1807 | 1808 | RXA00553 | GR00145 | 742 | 1062 |
| 1809 | 1810 | RXA00554 | GR00145 | 1606 | 1136 |
| 1811 | 1812 | RXA00563 | GR00151 | 1 | 2739 |
| 1813 | 1814 | RXA00564 | GR00151 | 3744 | 4148 |
| 1815 | 1816 | RXA00573 | GR00156 | 117 | 767 |
| 1817 | 1818 | RXA00576 | GR00156 | 2916 | 2245 |
| 1819 | 1820 | RXA00577 | GR00156 | 2980 | 3327 |
| 1821 | 1822 | RXA00578 | GR00156 | 4087 | 3365 |
| 1823 | 1824 | RXA00582 | GR00156 | 9442 | 8924 |
| 1825 | 1826 | RXA00585 | GR00156 | 11894 | 11577 |
| 1827 | 1828 | RXA00586 | GR00156 | 12818 | 11937 |
| 1829 | 1830 | RXA00587 | GR00156 | 13008 | 13490 |
| 1831 | 1832 | RXA00595 | GR00159 | 3 | 332 |
| 1833 | 1834 | RXA00597 | GR00159 | 797 | 1066 |
| 1835 | 1836 | RXA00598 | GR00159 | 1070 | 1387 |
| 1837 | 1838 | RXA00601 | GR00159 | 3459 | 3749 |
| 1839 | 1840 | RXA00602 | GR00159 | 4907 | 4155 |
| 1841 | 1842 | RXA00604 | GR00159 | 5489 | 5779 |
| 1843 | 1844 | RXA00610 | GR00161 | 1193 | 2056 |
| 1845 | 1846 | RXA00611 | GR00161 | 3640 | 2165 |
| 1847 | 1848 | RXA00613 | GR00162 | 1652 | 1200 |
| 1849 | 1850 | RXA00614 | GR00162 | 1680 | 2594 |
| 1851 | 1852 | RXA00617 | GR00162 | 4002 | 5084 |
| 1853 | 1854 | RXA00628 | GR00165 | 1284 | 877 |
| 1855 | 1856 | RXA00631 | GR00166 | 172 | 1626 |
| 1857 | 1858 | RXA00637 | GR00167 | 2002 | 2754 |
| 1859 | 1860 | RXA00646 | GR00169 | 446 | 6 |
| 1861 | 1862 | RXA00649 | GR00169 | 2823 | 3278 |
| 1863 | 1864 | RXA00652 | GR00169 | 5449 | 5997 |
| 1865 | 1866 | RXA00654 | GR00169 | 7213 | 8478 |
| 1867 | 1868 | RXA00656 | GR00169 | 9495 | 9235 |
| 1869 | 1870 | RXA00657 | GR00169 | 10882 | 9980 |
| 1871 | 1872 | RXA00661 | GR00172 | 664 | 1353 |
| 1873 | 1874 | RXA00667 | GR00175 | 593 | 1177 |
| 1875 | 1876 | RXA00676 | GR00178 | 647 | 1393 |
| 1877 | 1878 | RXA00678 | GR00179 | 1037 | 303 |
| 1879 | 1880 | RXA00691 | GR00181 | 2152 | 1223 |
| 1881 | 1882 | RXA00692 | GR00181 | 3450 | 2317 |
| 1883 | 1884 | RXA00693 | GR00181 | 4303 | 3821 |
| 1885 | 1886 | RXA00701 | GR00182 | 427 | 801 |
| 1887 | 1888 | RXA00707 | GR00185 | 377 | 1348 |
| 1889 | 1890 | RXA00713 | GR00188 | 71 | 1033 |
| 1891 | 1892 | RXA00714 | GR00188 | 1809 | 1249 |
| 1893 | 1894 | RXA00716 | GR00188 | 3002 | 3514 |
| 1895 | 1896 | RXA00719 | GR00188 | 5283 | 6911 |
| 1897 | 1898 | RXA00724 | GR00191 | 811 | 164 |
| 1899 | 1900 | RXA00726 | GR00192 | 841 | 701 |
| 1901 | 1902 | RXA00740 | GR00202 | 1646 | 1068 |
| 1903 | 1904 | RXA00741 | GR00202 | 2986 | 2054 |
| 1905 | 1906 | RXA00742 | GR00202 | 5517 | 3868 |
| 1907 | 1908 | RXA00743 | GR00202 | 6652 | 6230 |
| 1909 | 1910 | RXA00745 | GR00202 | 13874 | 13341 |
| 1911 | 1912 | RXA00746 | GR00202 | 13755 | 14945 |
| 1913 | 1914 | RXA00747 | GR00202 | 15067 | 15654 |
| 1915 | 1916 | RXA00748 | GR00202 | 15917 | 16360 |
| 1917 | 1918 | RXA00749 | GR00202 | 17240 | 16542 |
| 1919 | 1920 | RXA00751 | GR00202 | 20245 | 19418 |
| 1921 | 1922 | RXA00752 | GR00202 | 21847 | 21419 |
| 1923 | 1924 | RXA00757 | GR00203 | 3119 | 4372 |
| 1925 | 1926 | RXA00763 | GR00204 | 1384 | 2166 |
| 1927 | 1928 | RXA00765 | GR00204 | 3283 | 3969 |
| 1929 | 1930 | RXA00781 | GR00206 | 2682 | 2395 |
| 1931 | 1932 | RXA00788 | GR00209 | 910 | 686 |
| 1933 | 1934 | RXA00804 | GR00215 | 438 | 881 |
| 1935 | 1936 | RXA00805 | GR00215 | 2057 | 2938 |
| 1937 | 1938 | RXA00808 | GR00217 | 1029 | 352 |
| 1939 | 1940 | RXA00812 | GR00219 | 287 | 1345 |
| 1941 | 1942 | RXA00814 | GR00219 | 2463 | 3236 |
| 1943 | 1944 | RXA00815 | GR00219 | 3236 | 3808 |
| 1945 | 1946 | RXA00816 | GR00219 | 4382 | 4678 |
| 1947 | 1948 | RXA00826 | GR00223 | 567 | 37 |
| 1949 | 1950 | RXA00830 | GR00224 | 266 | 988 |
| 1951 | 1952 | RXA00853 | GR00231 | 3775 | 3173 |
| 1953 | 1954 | RXA00861 | GR00235 | 6 | 431 |
| 1955 | 1956 | RXA00862 | GR00236 | 580 | 17 |
| 1957 | 1958 | RXA00874 | GR00241 | 758 | 1846 |
| 1959 | 1960 | RXA00876 | GR00241 | 4208 | 2454 |
| 1961 | 1962 | RXA00881 | GR00242 | 8057 | 8434 |
| 1963 | 1964 | RXA00882 | GR00242 | 8788 | 9465 |
| 1965 | 1966 | RXA00883 | GR00242 | 10060 | 9542 |
| 1967 | 1968 | RXA00887 | GR00242 | 13544 | 14266 |
| 1969 | 1970 | RXA00889 | GR00242 | 15341 | 15928 |
| 1971 | 1972 | RXA00893 | GR00244 | 789 | 193 |
| 1973 | 1974 | RXA00895 | GR00244 | 2578 | 1988 |
| 1975 | 1976 | RXA00904 | GR00246 | 1457 | 702 |
| 1977 | 1978 | RXA00908 | GR00247 | 1611 | 2168 |
| 1979 | 1980 | RXA00916 | GR00251 | 4108 | 518 |
| 1981 | 1982 | RXA00926 | GR00253 | 466 | 104 |
| 1983 | 1984 | RXA00930 | GR00253 | 3841 | 3089 |
| 1985 | 1986 | RXA00932 | GR00253 | 5068 | 5541 |
| 1987 | 1988 | RXA00933 | GR00253 | 6047 | 5586 |
| 1989 | 1990 | RXA00940 | GR00257 | 129 | 524 |
| 1991 | 1992 | RXA00949 | GR00259 | 5400 | 6047 |
| 1993 | 1994 | RXA00969 | GR00273 | 1 | 147 |
| 1995 | 1996 | RXA00973 | GR00274 | 2272 | 1670 |
| 1997 | 1998 | RXA00978 | GR00276 | 217 | 831 |
| 1999 | 2000 | RXA00986 | GR00280 | 60 | 401 |
| 2001 | 2002 | RXA00987 | GR00280 | 875 | 411 |
| 2003 | 2004 | RXA00988 | GR00280 | 1371 | 949 |
| 2005 | 2006 | RXA01005 | GR00286 | 520 | 1365 |
| 2007 | 2008 | RXA01007 | GR00287 | 2572 | 866 |
| 2009 | 2010 | RXA01008 | GR00287 | 2719 | 4659 |
| 2011 | 2012 | RXA01011 | GR00288 | 2089 | 857 |
| 2013 | 2014 | RXA01017 | GR00290 | 2175 | 1567 |
| 2015 | 2016 | RXA01021 | GR00291 | 1759 | 2280 |
| 2017 | 2018 | RXA01029 | GR00295 | 1338 | 1826 |
| 2019 | 2020 | RXA01031 | GR00295 | 3182 | 3847 |
| 2021 | 2022 | RXA01032 | GR00295 | 3974 | 4348 |
| 2023 | 2024 | RXA01033 | GR00295 | 4363 | 4698 |
| 2025 | 2026 | RXA01034 | GR00295 | 5177 | 4824 |
| 2027 | 2028 | RXA01035 | GR00295 | 5818 | 6423 |
| 2029 | 2030 | RXA01036 | GR00295 | 6513 | 6965 |
| 2031 | 2032 | RXA01037 | GR00295 | 7000 | 7527 |
| 2033 | 2034 | RXA01038 | GR00295 | 7530 | 8276 |
| 2035 | 2036 | RXA01039 | GR00295 | 9540 | 8965 |
| 2037 | 2038 | RXA01040 | GR00295 | 9711 | 10613 |
| 2039 | 2040 | RXA01041 | GR00295 | 10780 | 10932 |
| 2041 | 2042 | RXA01042 | GR00295 | 11088 | 12365 |
| 2043 | 2044 | RXA01043 | GR00295 | 12774 | 13346 |
| 2045 | 2046 | RXA01044 | GR00295 | 14024 | 15280 |
| 2047 | 2048 | RXA01045 | GR00295 | 15407 | 17230 |
| 2049 | 2050 | RXA01046 | GR00295 | 17441 | 19219 |
| 2051 | 2052 | RXA01047 | GR00295 | 19244 | 19717 |
| 2053 | 2054 | RXA01058 | GR00296 | 8566 | 8246 |
| 2055 | 2056 | RXA01063 | GR00297 | 828 | 499 |
| 2057 | 2058 | RXA01066 | GR00298 | 605 | 1330 |
| 2059 | 2060 | RXA01068 | GR00298 | 2184 | 3254 |
| 2061 | 2062 | RXA01074 | GR00300 | 2811 | 2107 |
| 2063 | 2064 | RXA01076 | GR00300 | 4374 | 3355 |
| 2065 | 2066 | RXA01078 | GR00300 | 6043 | 6876 |
| 2067 | 2068 | RXA01083 | GR00302 | 1777 | 1502 |
| 2069 | 2070 | RXA01088 | GR00304 | 3083 | 1902 |
| 2071 | 2072 | RXA01091 | GR00305 | 546 | 76 |
| 2073 | 2074 | RXA01092 | GR00305 | 702 | 881 |
| 2075 | 2076 | RXA01092 | GR00305 | 702 | 881 |
| 2077 | 2078 | RXA01096 | GR00306 | 4341 | 3643 |
| 2079 | 2080 | RXA01102 | GR00306 | 10018 | 8774 |
| 2081 | 2082 | RXA01103 | GR00306 | 10316 | 10092 |
| 2083 | 2084 | RXA01107 | GR00306 | 13612 | 14811 |
| 2085 | 2086 | RXA01108 | GR00306 | 15562 | 14912 |
| 2087 | 2088 | RXA01109 | GR00306 | 16281 | 15640 |
| 2089 | 2090 | RXA01119 | GR00310 | 1068 | 139 |
| 2091 | 2092 | RXA01122 | GR00311 | 557 | 36 |
| 2093 | 2094 | RXA01123 | GR00311 | 1090 | 644 |
| 2095 | 2096 | RXA01127 | GR00314 | 2 | 280 |
| 2097 | 2098 | RXA01129 | GR00314 | 1461 | 3326 |
| 2099 | 2100 | RXA01131 | GR00315 | 445 | 1311 |
| 2101 | 2102 | RXA01137 | GR00318 | 1101 | 1460 |
| 2103 | 2104 | RXA01156 | GR00327 | 1588 | 1388 |
| 2105 | 2106 | RXA01158 | GR00328 | 2580 | 1639 |
| 2107 | 2108 | RXA01159 | GR00328 | 3089 | 2775 |
| 2109 | 2110 | RXA01160 | GR00328 | 4187 | 3213 |
| 2111 | 2112 | RXA01163 | GR00331 | 710 | 6 |
| 2113 | 2114 | RXA01165 | GR00332 | 2155 | 1583 |
| 2115 | 2116 | RXA01166 | GR00332 | 3005 | 2523 |
| 2117 | 2118 | RXA01170 | GR00334 | 638 | 1120 |
| 2119 | 2120 | RXA01171 | GR00334 | 1714 | 2406 |
| 2121 | 2122 | RXA01176 | GR00335 | 1980 | 1477 |
| 2123 | 2124 | RXA01177 | GR00335 | 2121 | 4106 |
| 2125 | 2126 | RXA01178 | GR00335 | 4106 | 4555 |
| 2127 | 2128 | RXA01184 | GR00338 | 1489 | 17 |
| 2129 | 2130 | RXA01186 | GR00338 | 3742 | 2645 |
| 2131 | 2132 | RXA01186 | GR00338 | 3742 | 2645 |
| 2133 | 2134 | RXA01187 | GR00338 | 3850 | 4308 |
| 2135 | 2136 | RXA01195 | GR00343 | 1413 | 1859 |
| 2137 | 2138 | RXA01196 | GR00343 | 1889 | 2578 |
| 2139 | 2140 | RXA01197 | GR00343 | 3333 | 2881 |
| 2141 | 2142 | RXA01198 | GR00343 | 3422 | 3724 |
| 2143 | 2144 | RXA01207 | GR00347 | 126 | 773 |
| 2145 | 2146 | RXA01213 | GR00351 | 1508 | 282 |
| 2147 | 2148 | RXA01218 | GR00353 | 1078 | 1506 |
| 2149 | 2150 | RXA01234 | GR00357 | 633 | 250 |
| 2151 | 2152 | RXA01237 | GR00358 | 2751 | 2311 |
| 2153 | 2154 | RXA01267 | GR00367 | 16799 | 15486 |
| 2155 | 2156 | RXA01268 | GR00367 | 19365 | 18526 |
| 2157 | 2158 | RXA01271 | GR00367 | 23467 | 21656 |
| 2159 | 2160 | RXA01273 | GR00367 | 26475 | 25042 |
| 2161 | 2162 | RXA01282 | GR00369 | 5444 | 4665 |
| 2163 | 2164 | RXA01294 | GR00373 | 3537 | 2872 |
| 2165 | 2166 | RXA01295 | GR00373 | 3764 | 4738 |
| 2167 | 2168 | RXA01304 | GR00376 | 1982 | 2467 |
| 2169 | 2170 | RXA01310 | GR00380 | 803 | 477 |
| 2171 | 2172 | RXA01313 | GR00381 | 1116 | 172 |
| 2173 | 2174 | RXA01315 | GR00382 | 1394 | 744 |
| 2175 | 2176 | RXA01316 | GR00382 | 1855 | 1553 |
| 2177 | 2178 | RXA01317 | GR00382 | 2296 | 1877 |
| 2179 | 2180 | RXA01318 | GR00382 | 3616 | 2315 |
| 2181 | 2182 | RXA01330 | GR00387 | 569 | 1024 |
| 2183 | 2184 | RXA01333 | GR00389 | 1231 | 227 |
| 2185 | 2186 | RXA01336 | GR00389 | 3640 | 3038 |
| 2187 | 2188 | RXA01342 | GR00389 | 11296 | 12807 |
| 2189 | 2190 | RXA01348 | GR00392 | 261 | 752 |
| 2191 | 2192 | RXA01349 | GR00392 | 1531 | 755 |
| 2193 | 2194 | RXA01357 | GR00393 | 4357 | 4659 |
| 2195 | 2196 | RXA01359 | GR00393 | 6857 | 8038 |
| 2197 | 2198 | RXA01366 | GR00397 | 1369 | 980 |
| 2199 | 2200 | RXA01367 | GR00397 | 1518 | 1919 |
| 2201 | 2202 | RXA01370 | GR00398 | 1875 | 2225 |
| 2203 | 2204 | RXA01372 | GR00399 | 1 | 591 |
| 2205 | 2206 | RXA01378 | GR00401 | 1281 | 4 |
| 2207 | 2208 | RXA01380 | GR00403 | 2 | 2017 |
| 2209 | 2210 | RXA01384 | GR00406 | 3238 | 1523 |
| 2211 | 2212 | RXA01396 | GR00408 | 6475 | 6218 |
| 2213 | 2214 | RXA01397 | GR00408 | 6894 | 6475 |
| 2215 | 2216 | RXA01401 | GR00409 | 3193 | 3453 |
| 2217 | 2218 | RXA01402 | GR00409 | 3508 | 3981 |
| 2219 | 2220 | RXA01405 | GR00410 | 1844 | 1389 |
| 2221 | 2222 | RXA01413 | GR00412 | 854 | 1453 |
| 2223 | 2224 | RXA01414 | GR00412 | 1628 | 2134 |
| 2225 | 2226 | RXA01417 | GR00414 | 645 | 49 |
| 2227 | 2228 | RXA01421 | GR00416 | 1215 | 829 |
| 2229 | 2230 | RXA01425 | GR00417 | 1701 | 2585 |
| 2231 | 2232 | RXA01429 | GR00417 | 5651 | 6268 |
| 2233 | 2234 | RXA01439 | GR00418 | 5949 | 6494 |
| 2235 | 2236 | RXA01440 | GR00418 | 7496 | 6489 |
| 2237 | 2238 | RXA01441 | GR00418 | 8542 | 7514 |
| 2239 | 2240 | RXA01445 | GR00418 | 15083 | 14091 |
| 2241 | 2242 | RXA01447 | GR00418 | 17885 | 18733 |
| 2243 | 2244 | RXA01452 | GR00419 | 2363 | 2641 |
| 2245 | 2246 | RXA01456 | GR00420 | 898 | 1419 |
| 2247 | 2248 | RXA01457 | GR00420 | 1499 | 2173 |
| 2249 | 2250 | RXA01463 | GR00421 | 2493 | 1330 |
| 2251 | 2252 | RXA01469 | GR00422 | 2091 | 3122 |
| 2253 | 2254 | RXA01470 | GR00422 | 4112 | 3687 |
| 2255 | 2256 | RXA01472 | GR00422 | 5783 | 5328 |
| 2257 | 2258 | RXA01473 | GR00422 | 6596 | 5832 |
| 2259 | 2260 | RXA01474 | GR00422 | 6678 | 7223 |
| 2261 | 2262 | RXA01475 | GR00422 | 7651 | 7226 |
| 2263 | 2264 | RXA01476 | GR00422 | 7847 | 8188 |
| 2265 | 2266 | RXA01488 | GR00423 | 2179 | 1349 |
| 2267 | 2268 | RXA01494 | GR00423 | 8515 | 7520 |
| 2269 | 2270 | RXA01497 | GR00424 | 262 | 1179 |
| 2271 | 2272 | RXA01501 | GR00424 | 8130 | 7843 |
| 2273 | 2274 | RXA01504 | GR00424 | 10710 | 11318 |
| 2275 | 2276 | RXA01505 | GR00424 | 11318 | 11815 |
| 2277 | 2278 | RXA01506 | GR00424 | 11815 | 12225 |
| 2279 | 2280 | RXA01507 | GR00424 | 12239 | 12661 |
| 2281 | 2282 | RXA01519 | GR00424 | 23725 | 24471 |
| 2283 | 2284 | RXA01520 | GR00424 | 24784 | 25167 |
| 2285 | 2286 | RXA01523 | GR00424 | 27951 | 28901 |
| 2287 | 2288 | RXA01525 | GR00424 | 32301 | 30580 |
| 2289 | 2290 | RXA01527 | GR00425 | 5126 | 2616 |
| 2291 | 2292 | RXA01536 | GR00427 | 4066 | 2825 |
| 2293 | 2294 | RXA01540 | GR00428 | 3083 | 2382 |
| 2295 | 2296 | RXA01543 | GR00430 | 2802 | 37 |
| 2297 | 2298 | RXA01544 | GR00430 | 3496 | 2897 |
| 2299 | 2300 | RXA01545 | GR00430 | 4838 | 3588 |
| 2301 | 2302 | RXA01546 | GR00430 | 5584 | 4889 |
| 2303 | 2304 | RXA01547 | GR00430 | 6371 | 5709 |
| 2305 | 2306 | RXA01548 | GR00430 | 7432 | 6425 |
| 2307 | 2308 | RXA01552 | GR00431 | 6122 | 5145 |
| 2309 | 2310 | RXA01554 | GR00432 | 3719 | 1578 |
| 2311 | 2312 | RXA01560 | GR00435 | 767 | 438 |
| 2313 | 2314 | RXA01575 | GR00438 | 8024 | 7005 |
| 2315 | 2316 | RXA01577 | GR00438 | 8811 | 9185 |
| 2317 | 2318 | RXA01579 | GR00439 | 671 | 1054 |
| 2319 | 2320 | RXA01585 | GR00441 | 1226 | 600 |
| 2321 | 2322 | RXA01586 | GR00441 | 1597 | 1229 |
| 2323 | 2324 | RXA01595 | GR00447 | 3326 | 4285 |
| 2325 | 2326 | RXA01600 | GR00447 | 10460 | 11128 |
| 2327 | 2328 | RXA01602 | GR00447 | 13591 | 12062 |
| 2329 | 2330 | RXA01605 | GR00448 | 960 | 2474 |
| 2331 | 2332 | RXA01610 | GR00449 | 4343 | 3615 |
| 2333 | 2334 | RXA01611 | GR00449 | 4832 | 4476 |
| 2335 | 2336 | RXA01612 | GR00449 | 5235 | 4891 |
| 2337 | 2338 | RXA01619 | GR00451 | 2407 | 1433 |
| 2339 | 2340 | RXA01622 | GR00452 | 1908 | 2510 |
| 2341 | 2342 | RXA01623 | GR00452 | 2514 | 3224 |
| 2343 | 2344 | RXA01624 | GR00452 | 3220 | 3564 |
| 2345 | 2346 | RXA01628 | GR00453 | 866 | 1879 |
| 2347 | 2348 | RXA01630 | GR00454 | 341 | 1417 |
| 2349 | 2350 | RXA01641 | GR00456 | 5182 | 6552 |
| 2351 | 2352 | RXA01642 | GR00456 | 6557 | 7798 |
| 2353 | 2354 | RXA01643 | GR00456 | 8374 | 7949 |
| 2355 | 2356 | RXA01645 | GR00456 | 10574 | 9969 |
| 2357 | 2358 | RXA01646 | GR00456 | 11513 | 10695 |
| 2359 | 2360 | RXA01656 | GR00460 | 1548 | 2444 |
| 2361 | 2362 | RXA01665 | GR00463 | 2152 | 1433 |
| 2363 | 2364 | RXA01671 | GR00466 | 854 | 1468 |
| 2365 | 2366 | RXA01673 | GR00467 | 1807 | 773 |
| 2367 | 2368 | RXA01675 | GR00467 | 2824 | 3234 |
| 2369 | 2370 | RXA01676 | GR00467 | 4179 | 3424 |
| 2371 | 2372 | RXA01677 | GR00467 | 5043 | 4300 |
| 2373 | 2374 | RXA01681 | GR00467 | 10681 | 11313 |
| 2375 | 2376 | RXA01685 | GR00470 | 1488 | 910 |
| 2377 | 2378 | RXA01686 | GR00470 | 2026 | 1586 |
| 2379 | 2380 | RXA01693 | GR00474 | 1553 | 2974 |
| 2381 | 2382 | RXA01714 | GR00485 | 985 | 371 |
| 2383 | 2384 | RXA01715 | GR00485 | 1267 | 1962 |
| 2385 | 2386 | RXA01729 | GR00489 | 2636 | 3154 |
| 2387 | 2388 | RXA01731 | GR00491 | 109 | 807 |
| 2389 | 2390 | RXA01738 | GR00493 | 3971 | 4684 |
| 2391 | 2392 | RXA01741 | GR00493 | 7535 | 6738 |
| 2393 | 2394 | RXA01748 | GR00495 | 3681 | 4460 |
| 2395 | 2396 | RXA01749 | GR00495 | 4633 | 6249 |
| 2397 | 2398 | RXA01750 | GR00496 | 1878 | 3518 |
| 2399 | 2400 | RXA01752 | GR00497 | 557 | 6 |
| 2401 | 2402 | RXA01753 | GR00497 | 2095 | 557 |
| 2403 | 2404 | RXA01760 | GR00498 | 5095 | 5376 |
| 2405 | 2406 | RXA01768 | GR00501 | 827 | 450 |
| 2407 | 2408 | RXA01770 | GR00501 | 5134 | 1370 |
| 2409 | 2410 | RXA01773 | GR00503 | 34 | 444 |
| 2411 | 2412 | RXA01775 | GR00504 | 178 | 741 |
| 2413 | 2414 | RXA01776 | GR00504 | 838 | 2289 |
| 2415 | 2416 | RXA01777 | GR00504 | 2319 | 2777 |
| 2417 | 2418 | RXA01778 | GR00504 | 2912 | 4048 |
| 2419 | 2420 | RXA01779 | GR00504 | 4246 | 5664 |
| 2421 | 2422 | RXA01780 | GR00504 | 5721 | 6095 |
| 2423 | 2424 | RXA01781 | GR00504 | 6052 | 6312 |
| 2425 | 2426 | RXA01782 | GR00504 | 6384 | 6779 |
| 2427 | 2428 | RXA01783 | GR00504 | 6842 | 7078 |
| 2429 | 2430 | RXA01785 | GR00505 | 729 | 1304 |
| 2431 | 2432 | RXA01788 | GR00506 | 361 | 801 |
| 2433 | 2434 | RXA01789 | GR00506 | 875 | 1516 |
| 2435 | 2436 | RXA01790 | GR00506 | 1672 | 1731 |
| 2437 | 2438 | RXA01791 | GR00506 | 1885 | 2247 |
| 2439 | 2440 | RXA01792 | GR00506 | 2310 | 2582 |
| 2441 | 2442 | RXA01793 | GR00506 | 2916 | 3149 |
| 2443 | 2444 | RXA01794 | GR00506 | 3194 | 3427 |
| 2445 | 2446 | RXA01799 | GR00509 | 377 | 1570 |
| 2447 | 2448 | RXA01800 | GR00509 | 2292 | 1573 |
| 2449 | 2450 | RXA01804 | GR00509 | 6117 | 5797 |
| 2451 | 2452 | RXA01805 | GR00509 | 6515 | 6186 |
| 2453 | 2454 | RXA01806 | GR00509 | 6595 | 7074 |
| 2455 | 2456 | RXA01816 | GR00515 | 4210 | 4941 |
| 2457 | 2458 | RXA01817 | GR00515 | 4941 | 5573 |
| 2459 | 2460 | RXA01820 | GR00515 | 8360 | 9733 |
| 2461 | 2462 | RXA01842 | GR00522 | 1397 | 480 |
| 2463 | 2464 | RXA01844 | GR00522 | 1950 | 1771 |
| 2465 | 2466 | RXA01845 | GR00522 | 1919 | 2326 |
| 2467 | 2468 | RXA01856 | GR00527 | 225 | 770 |
| 2469 | 2470 | RXA01857 | GR00527 | 939 | 1589 |
| 2471 | 2472 | RXA01858 | GR00529 | 578 | 6 |
| 2473 | 2474 | RXA01870 | GR00534 | 2123 | 2797 |
| 2475 | 2476 | RXA01871 | GR00534 | 2797 | 3759 |
| 2477 | 2478 | RXA01903 | GR00545 | 3 | 281 |
| 2479 | 2480 | RXA01904 | GR00545 | 762 | 340 |
| 2481 | 2482 | RXA01905 | GR00545 | 1074 | 1604 |
| 2483 | 2484 | RXA01906 | GR00545 | 2322 | 2786 |
| 2485 | 2486 | RXA01907 | GR00545 | 3176 | 3787 |
| 2487 | 2488 | RXA01923 | GR00552 | 1311 | 1739 |
| 2489 | 2490 | RXA01931 | GR00555 | 4913 | 5566 |
| 2491 | 2492 | RXA01941 | GR00557 | 995 | 1429 |
| 2493 | 2494 | RXA01942 | GR00557 | 3526 | 2927 |
| 2495 | 2496 | RXA01957 | GR00564 | 389 | 850 |
| 2497 | 2498 | RXA01958 | GR00564 | 910 | 1416 |
| 2499 | 2500 | RXA01959 | GR00564 | 1639 | 2019 |
| 2501 | 2502 | RXA01961 | GR00565 | 521 | 1000 |
| 2503 | 2504 | RXA01962 | GR00565 | 1022 | 1591 |
| 2505 | 2506 | RXA01963 | GR00565 | 1757 | 2440 |
| 2507 | 2508 | RXA01964 | GR00566 | 1329 | 4 |
| 2509 | 2510 | RXA01965 | GR00566 | 1935 | 1375 |
| 2511 | 2512 | RXA01966 | GR00567 | 47 | 703 |
| 2513 | 2514 | RXA01968 | GR00567 | 3295 | 2138 |
| 2515 | 2516 | RXA01969 | GR00567 | 5689 | 5216 |
| 2517 | 2518 | RXA01973 | GR00570 | 2 | 583 |
| 2519 | 2520 | RXA01974 | GR00570 | 658 | 2109 |
| 2521 | 2522 | RXA01976 | GR00571 | 3742 | 2222 |
| 2523 | 2524 | RXA01977 | GR00571 | 4547 | 3972 |
| 2525 | 2526 | RXA01982 | GR00573 | 3001 | 1844 |
| 2527 | 2528 | RXA01990 | GR00581 | 1 | 999 |
| 2529 | 2530 | RXA01992 | GR00583 | 709 | 260 |
| 2531 | 2532 | RXA01999 | GR00589 | 2384 | 2854 |
| 2533 | 2534 | RXA02001 | GR00590 | 700 | 152 |
| 2535 | 2536 | RXA02004 | GR00594 | 3 | 209 |
| 2537 | 2538 | RXA02006 | GR00597 | 498 | 4 |
| 2539 | 2540 | RXA02009 | GR00601 | 127 | 5 |
| 2541 | 2542 | RXA02013 | GR00607 | 553 | 5 |
| 2543 | 2544 | RXA02021 | GR00613 | 2008 | 1061 |
| 2545 | 2546 | RXA02036 | GR00619 | 3441 | 3821 |
| 2547 | 2548 | RXA02040 | GR00621 | 1452 | 925 |
| 2549 | 2550 | RXA02046 | GR00623 | 2680 | 2943 |
| 2551 | 2552 | RXA02051 | GR00624 | 3186 | 3683 |
| 2553 | 2554 | RXA02053 | GR00624 | 5484 | 6062 |
| 2555 | 2556 | RXA02057 | GR00625 | 2972 | 3502 |
| 2557 | 2558 | RXA02058 | GR00625 | 4051 | 3500 |
| 2559 | 2560 | RXA02069 | GR00627 | 1116 | 1694 |
| 2561 | 2562 | RXA02070 | GR00627 | 1733 | 2830 |
| 2563 | 2564 | RXA02080 | GR00628 | 11017 | 10211 |
| 2565 | 2566 | RXA02081 | GR00628 | 12307 | 13935 |
| 2567 | 2568 | RXA02084 | GR00629 | 2920 | 2576 |
| 2569 | 2570 | RXA02089 | GR00629 | 8431 | 8901 |
| 2571 | 2572 | RXA02090 | GR00629 | 9764 | 8964 |
| 2573 | 2574 | RXA02091 | GR00629 | 10512 | 9862 |
| 2575 | 2576 | RXA02097 | GR00630 | 184 | 3555 |
| 2577 | 2578 | RXA02102 | GR00631 | 4479 | 3322 |
| 2579 | 2580 | RXA02103 | GR00631 | 4510 | 4905 |
| 2581 | 2582 | RXA02109 | GR00632 | 3460 | 2540 |
| 2583 | 2584 | RXA02117 | GR00636 | 1056 | 1529 |
| 2585 | 2586 | RXA02123 | GR00636 | 6558 | 7928 |
| 2587 | 2588 | RXA02124 | GR00636 | 7956 | 9911 |
| 2589 | 2590 | RXA02125 | GR00637 | 739 | 1539 |
| 2591 | 2592 | RXA02129 | GR00637 | 5906 | 6139 |
| 2593 | 2594 | RXA02132 | GR00638 | 737 | 1375 |
| 2595 | 2596 | RXA02137 | GR00639 | 4166 | 3369 |
| 2597 | 2598 | RXA02141 | GR00639 | 8457 | 8864 |
| 2599 | 2600 | RXA02146 | GR00639 | 14742 | 15368 |
| 2601 | 2602 | RXA02152 | GR00640 | 237 | 638 |
| 2603 | 2604 | RXA02163 | GR00640 | 10072 | 10824 |
| 2605 | 2606 | RXA02164 | GR00640 | 10824 | 12398 |
| 2607 | 2608 | RXA02165 | GR00640 | 12388 | 12999 |
| 2609 | 2610 | RXA02166 | GR00640 | 13048 | 13224 |
| 2611 | 2612 | RXA02168 | GR00641 | 2894 | 81 |
| 2613 | 2614 | RXA02170 | GR00641 | 4798 | 4025 |
| 2615 | 2616 | RXA02172 | GR00641 | 6919 | 6581 |
| 2617 | 2618 | RXA02177 | GR00641 | 12683 | 13615 |
| 2619 | 2620 | RXA02178 | GR00641 | 13628 | 14497 |
| 2621 | 2622 | RXA02181 | GR00641 | 17168 | 17845 |
| 2623 | 2624 | RXA02183 | GR00641 | 18663 | 19187 |
| 2625 | 2626 | RXA02187 | GR00641 | 21249 | 23447 |
| 2627 | 2628 | RXA02199 | GR00646 | 2591 | 3160 |
| 2629 | 2630 | RXA02203 | GR00646 | 7469 | 7092 |
| 2631 | 2632 | RXA02206 | GR00646 | 9927 | 10862 |
| 2633 | 2634 | RXA02211 | GR00648 | 2537 | 2989 |
| 2635 | 2636 | RXA02212 | GR00649 | 964 | 467 |
| 2637 | 2638 | RXA02216 | GR00651 | 2 | 307 |
| 2639 | 2640 | RXA02217 | GR00651 | 968 | 306 |
| 2641 | 2642 | RXA02218 | GR00651 | 1299 | 1565 |
| 2643 | 2644 | RXA02219 | GR00651 | 1578 | 2963 |
| 2645 | 2646 | RXA02221 | GR00651 | 6720 | 8081 |
| 2647 | 2648 | RXA02227 | GR00653 | 1236 | 1853 |
| 2649 | 2650 | RXA02230 | GR00653 | 4156 | 3620 |
| 2651 | 2652 | RXA02231 | GR00653 | 5111 | 4356 |
| 2653 | 2654 | RXA02244 | GR00654 | 12058 | 13590 |
| 2655 | 2656 | RXA02255 | GR00654 | 22507 | 23442 |
| 2657 | 2658 | RXA02266 | GR00655 | 653 | 1165 |
| 2659 | 2660 | RXA02267 | GR00655 | 2053 | 1181 |
| 2661 | 2662 | RXA02280 | GR00658 | 2 | 754 |
| 2663 | 2664 | RXA02286 | GR00660 | 3285 | 3833 |
| 2665 | 2666 | RXA02287 | GR00660 | 4071 | 4622 |
| 2667 | 2668 | RXA02294 | GR00662 | 5992 | 5618 |
| 2669 | 2670 | RXA02295 | GR00662 | 6842 | 6063 |
| 2671 | 2672 | RXA02297 | GR00662 | 7502 | 8638 |
| 2673 | 2674 | RXA02298 | GR00662 | 10310 | 8652 |
| 2675 | 2676 | RXA02304 | GR00663 | 1613 | 723 |
| 2677 | 2678 | RXA02308 | GR00664 | 939 | 511 |
| 2679 | 2680 | RXA02324 | GR00668 | 1548 | 2633 |
| 2681 | 2682 | RXA02325 | GR00668 | 4314 | 3445 |
| 2683 | 2684 | RXA02331 | GR00671 | 396 | 761 |
| 2685 | 2686 | RXA02336 | GR00672 | 2731 | 2552 |
| 2687 | 2688 | RXA02347 | GR00677 | 509 | 189 |
| 2689 | 2690 | RXA02349 | GR00678 | 394 | 5 |
| 2691 | 2692 | RXA02352 | GR00681 | 2 | 556 |
| 2693 | 2694 | RXA02356 | GR00684 | 761 | 1756 |
| 2695 | 2696 | RXA02358 | GR00685 | 1239 | 1529 |
| 2697 | 2698 | RXA02362 | GR00685 | 7045 | 10743 |
| 2699 | 2700 | RXA02374 | GR00688 | 1626 | 2246 |
| 2701 | 2702 | RXA02390 | GR00695 | 1500 | 832 |
| 2703 | 2704 | RXA02393 | GR00697 | 168 | 449 |
| 2705 | 2706 | RXA02395 | GR00698 | 2 | 733 |
| 2707 | 2708 | RXA02396 | GR00698 | 1309 | 1031 |
| 2709 | 2710 | RXA02403 | GR00700 | 896 | 1660 |
| 2711 | 2712 | RXA02412 | GR00703 | 2043 | 2522 |
| 2713 | 2714 | RXA02417 | GR00705 | 4755 | 2632 |
| 2715 | 2716 | RXA02421 | GR00705 | 7237 | 6428 |
| 2717 | 2718 | RXA02425 | GR00707 | 1 | 630 |
| 2719 | 2720 | RXA02427 | GR00707 | 3447 | 3061 |
| 2721 | 2722 | RXA02430 | GR00707 | 7498 | 7683 |
| 2723 | 2724 | RXA02433 | GR00708 | 2981 | 3580 |
| 2725 | 2726 | RXA02437 | GR00709 | 1661 | 2470 |
| 2727 | 2728 | RXA02443 | GR00709 | 6818 | 7771 |
| 2729 | 2730 | RXA02444 | GR00709 | 7836 | 9113 |
| 2731 | 2732 | RXA02452 | GR00710 | 5271 | 5092 |
| 2733 | 2734 | RXA02459 | GR00712 | 4341 | 5075 |
| 2735 | 2736 | RXA02461 | GR00712 | 6252 | 5845 |
| 2737 | 2738 | RXA02467 | GR00714 | 643 | 419 |
| 2739 | 2740 | RXA02472 | GR00715 | 5435 | 5725 |
| 2741 | 2742 | RXA02473 | GR00715 | 6664 | 5924 |
| 2743 | 2744 | RXA02475 | GR00715 | 9595 | 8441 |
| 2745 | 2746 | RXA02478 | GR00716 | 1245 | 10 |
| 2747 | 2748 | RXA02482 | GR00718 | 914 | 105 |
| 2749 | 2750 | RXA02483 | GR00718 | 1813 | 1001 |
| 2751 | 2752 | RXA02484 | GR00718 | 2317 | 1817 |
| 2753 | 2754 | RXA02486 | GR00718 | 3441 | 4076 |
| 2755 | 2756 | RXA02488 | GR00719 | 1 | 369 |
| 2757 | 2758 | RXA02489 | GR00719 | 373 | 996 |
| 2759 | 2760 | RXA02495 | GR00720 | 9002 | 6435 |
| 2761 | 2762 | RXA02496 | GR00720 | 10025 | 9219 |
| 2763 | 2764 | RXA02498 | GR00720 | 11016 | 11819 |
| 2765 | 2766 | RXA02500 | GR00720 | 13460 | 13558 |
| 2767 | 2768 | RXA02506 | GR00720 | 19484 | 18603 |
| 2769 | 2770 | RXA02514 | GR00723 | 1 | 837 |
| 2771 | 2772 | RXA02518 | GR00723 | 3464 | 3874 |
| 2773 | 2774 | RXA02521 | GR00724 | 2924 | 4366 |
| 2775 | 2776 | RXA02524 | GR00725 | 2405 | 3094 |
| 2777 | 2778 | RXA02525 | GR00725 | 3113 | 3490 |
| 2779 | 2780 | RXA02540 | GR00726 | 12438 | 12001 |
| 2781 | 2782 | RXA02544 | GR00726 | 16715 | 18142 |
| 2783 | 2784 | RXA02545 | GR00726 | 18749 | 18192 |
| 2785 | 2786 | RXA02546 | GR00726 | 19927 | 18824 |
| 2787 | 2788 | RXA02549 | GR00728 | 1331 | 6 |
| 2789 | 2790 | RXA02552 | GR00730 | 924 | 130 |
| 2791 | 2792 | RXA02554 | GR00731 | 1050 | 427 |
| 2793 | 2794 | RXA02569 | GR00736 | 82 | 831 |
| 2795 | 2796 | RXA02570 | GR00736 | 837 | 1478 |
| 2797 | 2798 | RXA02573 | GR00739 | 594 | 151 |
| 2799 | 2800 | RXA02575 | GR00739 | 1907 | 3064 |
| 2801 | 2802 | RXA02576 | GR00740 | 1569 | 148 |
| 2803 | 2804 | RXA02577 | GR00740 | 2463 | 1579 |
| 2805 | 2806 | RXA02584 | GR00741 | 8925 | 8575 |
| 2807 | 2808 | RXA02585 | GR00741 | 9917 | 8937 |
| 2809 | 2810 | RXA02588 | GR00741 | 13037 | 12354 |
| 2811 | 2812 | RXA02591 | GR00741 | 15780 | 17609 |
| 2813 | 2814 | RXA02598 | GR00742 | 2576 | 3166 |
| 2815 | 2816 | RXA02600 | GR00742 | 5027 | 3630 |
| 2817 | 2818 | RXA02601 | GR00742 | 5258 | 7246 |
| 2819 | 2820 | RXA02602 | GR00742 | 7239 | 7742 |
| 2821 | 2822 | RXA02604 | GR00742 | 8800 | 10875 |
| 2823 | 2824 | RXA02609 | GR00742 | 16197 | 16445 |
| 2825 | 2826 | RXA02617 | GR00745 | 1404 | 1910 |
| 2827 | 2828 | RXA02619 | GR00746 | 204 | 1103 |
| 2829 | 2830 | RXA02620 | GR00746 | 1192 | 1845 |
| 2831 | 2832 | RXA02639 | GR00749 | 511 | 1344 |
| 2833 | 2834 | RXA02647 | GR00751 | 4155 | 4616 |
| 2835 | 2836 | RXA02649 | GR00752 | 1284 | 283 |
| 2837 | 2838 | RXA02652 | GR00752 | 2973 | 3551 |
| 2839 | 2840 | RXA02655 | GR00752 | 9313 | 8330 |
| 2841 | 2842 | RXA02662 | GR00753 | 1461 | 1724 |
| 2843 | 2844 | RXA02665 | GR00753 | 6497 | 6018 |
| 2845 | 2846 | RXA02670 | GR00753 | 10199 | 10780 |
| 2847 | 2848 | RXA02672 | GR00753 | 12303 | 13400 |
| 2849 | 2850 | RXA02678 | GR00754 | 3858 | 4775 |
| 2851 | 2852 | RXA02683 | GR00754 | 7742 | 7065 |
| 2853 | 2854 | RXA02685 | GR00754 | 10058 | 9402 |
| 2855 | 2856 | RXA02688 | GR00754 | 12256 | 12924 |
| 2857 | 2858 | RXA02689 | GR00754 | 13405 | 13064 |
| 2859 | 2860 | RXA02690 | GR00754 | 14502 | 13405 |
| 2861 | 2862 | RXA02700 | GR00757 | 3507 | 4742 |
| 2863 | 2864 | RXA02701 | GR00757 | 4838 | 6145 |
| 2865 | 2866 | RXA02712 | GR00758 | 13067 | 12273 |
| 2867 | 2868 | RXA02714 | GR00758 | 14754 | 14326 |
| 2869 | 2870 | RXA02715 | GR00758 | 15847 | 15458 |
| 2871 | 2872 | RXA02721 | GR00759 | 1373 | 636 |
| 2873 | 2874 | RXA02725 | GR00760 | 1478 | 867 |
| 2875 | 2876 | RXA02727 | GR00760 | 6287 | 5376 |
| 2877 | 2878 | RXA02735 | GR00763 | 777 | 73 |
| 2879 | 2880 | RXA02736 | GR00763 | 1753 | 797 |
| 2881 | 2882 | RXA02751 | GR00764 | 6393 | 5920 |
| 2883 | 2884 | RXA02756 | GR00766 | 3851 | 2961 |
| 2885 | 2886 | RXA02757 | GR00766 | 4475 | 3930 |
| 2887 | 2888 | RXA02765 | GR00769 | 3552 | 2794 |
| 2889 | 2890 | RXA02766 | GR00770 | 986 | 594 |
| 2891 | 2892 | RXA02774 | GR00773 | 3 | 473 |
| 2893 | 2894 | RXA02775 | GR00773 | 744 | 968 |
| 2895 | 2896 | RXA02776 | GR00773 | 1713 | 1372 |
| 2897 | 2898 | RXA02777 | GR00773 | 4626 | 5732 |
| 2899 | 2900 | RXA02778 | GR00773 | 10095 | 10319 |
| 2901 | 2902 | RXA02779 | GR00773 | 10617 | 10895 |
| 2903 | 2904 | RXA02780 | GR00773 | 10954 | 11280 |
| 2905 | 2906 | RXA02783 | GR00775 | 845 | 1393 |
| 2907 | 2908 | RXA02784 | GR00775 | 1751 | 1936 |
| 2909 | 2910 | RXA02786 | GR00777 | 2 | 808 |
| 2911 | 2912 | RXA02789 | GR00777 | 5237 | 5782 |
| 2913 | 2914 | RXA02793 | GR00777 | 9385 | 8684 |
| 2915 | 2916 | RXA02796 | GR00778 | 1648 | 1100 |
| 2917 | 2918 | RXA02798 | GR00778 | 2842 | 4266 |
| 2919 | 2920 | RXA02799 | GR00780 | 182 | 454 |
| 2921 | 2922 | RXA02815 | GR00796 | 3 | 554 |
| 2923 | 2924 | RXA02823 | GR00804 | 275 | 6 |
| 2925 | 2926 | RXA02827 | GR00812 | 428 | 6 |
| 2927 | 2928 | RXA02842 | GR00841 | 356 | 15 |
| 2929 | 2930 | RXA02845 | GR00844 | 2 | 616 |
| 2931 | 2932 | RXA02848 | GR00848 | 113 | 511 |

What is claimed:

1. An isolated nucleic acid molecule selected from the group consisting of
a) an isolated nucleic acid molecule comprising the nucleotide sequence of SEQ ID NO:2543, or a complement thereof;
b) an isolated nucleic acid molecule which encodes a polypeptide comprising the amino acid sequence of SEQ ID NO:2544, or a complement thereof;
c) an isolated nucleic acid molecule which encodes a naturally occurring allelic variant of a polypeptide comprising the amino acid sequence of SEQ ID NO:2544, or a complement thereof;
d) an isolated nucleic acid molecule comprising a nucleotide sequence which is at least 50% identical to the entire nucleotide sequence of SEQ ID NO:2543, or a complement thereof; and
e) an isolated nucleic acid molecule comprising a fragment of at least 15 contiguous nucleotides of the nucleotide sequence of SEQ ID NO:2543, or a complement thereof.

2. An isolated nucleic acid molecule comprising the nucleic acid molecule of claim 1 and a nucleotide sequence encoding a heterologous polypeptide.

3. A vector comprising the nucleic acid molecule of claim 1.

4. The vector of claim 3, which is an expression vector.

5. A host cell transfected with the expression vector of claim 4.

6. The host cell of claim 5, wherein said cell is a microorganism.

7. The host cell of claim 6, wherein said cell belongs to the genus Corynebacterium or Brevibacterium.

8. A method of producing a polypeptide comprising culturing the host cell of claim 5 in an appropriate culture medium to, thereby, produce the polypeptide.

9. A method for producing a fine chemical, comprising culturing the cell of claim 5 such that the fine chemical is produced.

10. The method of claim 9, wherein said method further comprises the step of recovering the fine chemical from said culture.

11. The method of claim 9, wherein said cell belongs to the genus Corynebacterium or Brevibacterium.

12. The method of claim 9, wherein said cell is selected from the group consisting of Corynebacterium glutamicum, Corynebacterium herculis, Corynebacterium, lilium, Corynebacterium acetoacidophilum, Corynebacterium acetoglutamicum, Corynebacterium acetophilum, Corynebacterium ammoniagenes, Corynebacterium fujiokense, Corynebacterium nitrilophilus, Brevibacterium ammoniagenes, Brevibacterium butanicum, Brevibacterium divaricatum, Brevibacterium flavum, Brevibacterium healii, Brevibacterium ketoglutamicum, Brevibacterium ketosoreductum, Brevibacterium lactofermentum, Brevibacterium linens, Brevibacterium paraffinolyticum, and those strains set forth in Table 3.

13. The method of claim 9, wherein expression of the nucleic acid molecule from said vector results in modulation of production of said fine chemical.

14. The method of claim 9, wherein said fine chemical is selected from the group consisting of organic acids, proteinogenic and nonproteinogenic amino acids, purine and pyrimidine bases, nucleosides, nucleotides, lipids, saturated and unsaturated fatty acids, diols, carbohydrates, aromatic compounds, vitamins, cofactors, polyketides, and enzymes.

15. The method of claim 9, wherein said fine chemical is an amino acid selected from the group consisting of lysine, glutamate, glutamine, alanine, aspartate, glycine, serine, threonine, methionine, cysteine, valine, leucine, isoleucine, arginine, proline, histidine, tyrosine, phenylalanine, and tryptophan.

16. An isolated polypeptide selected from the group consisting of
a) an isolated polypeptide comprising the amino acid sequence of SEQ ID NO:2544;
b) an isolated polypeptide comprising a naturally occurring allelic variant of a polypeptide comprising the amino acid sequence of SEQ ID NO:2544;
c) an isolated polypeptide which is encoded by a nucleic acid molecule comprising the nucleotide sequence of SEQ ID NO:2543;
d) an isolated polypeptide which is encoded by a nucleic acid molecule comprising a nucleotide sequence which is at least 50% identical to the entire nucleotide sequence of SEQ ID NO:2543;
e) an isolated polypeptide comprising an amino acid sequence which is at least 50% identical to the entire amino acid sequence of SEQ ID NO:2544; and
f) an isolated polypeptide comprising a fragment of a polypeptide comprising the amino acid sequence of SEQ ID NO:2544, wherein said polypeptide fragment maintains a biological activity of the polypeptide comprising the amino sequence.

17. The isolated polypeptide of claim 16, further comprising heterologous amino acid sequences.

18. A method for diagnosing the presence or activity of Corynebacterium diphtheriae in a subject, comprising detecting the presence of at least one of the nucleic acid molecules of claim 1, thereby diagnosing the presence or activity of Corynebacterium diphtheriae in the subject.

19. A method for diagnosing the presence or activity of Corynebacterium diphtheriae in a subject, comprising detecting the presence of at least one of the polypeptide molecules of claim 16, thereby diagnosing the presence or activity of Corynebacterium diphtheriae in the subject.

20. A host cell comprising a nucleic acid molecule selected from the group consisting of
a) the nucleic acid molecule of SEQ ID NO:2543, wherein the nucleic acid molecule is disrupted by at least one technique selected from the group consisting of a point mutation, a truncation, an inversion, a deletion, an addition, a substitution and homologous recombination;
b) the nucleic acid molecule of SEQ ID NO:2543, wherein the nucleic acid molecule comprises one or more nucleic acid modifications as compared to the sequence of SEQ ID NO:2543, wherein the modification is selected from the group consisting of a point mutation, a truncation, an inversion, a deletion, an addition and a substitution; and
c) the nucleic acid molecule of SEQ ID NO:2543, wherein the regulatory region of the nucleic acid molecule is modified relative to the wild-type regulatory region of the molecule by at least one technique selected from the group consisting of a point mutation, a truncation, an inversion, a deletion, an addition, a substitution and homologous recombination.

The application's sequence listing, which the Patent Office published only in electronic form, follows.

SEQUENCE LISTING (2934 sequences)

SEQ ID NO: 1 - DNA, 1023 bp, Corynebacterium glutamicum
  CDS (101)..(1000): RXN01638
aggcatcaaacccacagcacaaccaccaggacgtgccacgatgtccatccgtggtgaaaacatcggtgttgcacagatggcaccgcataggtgatgactcatgagcacccaaacaatcaccatcacagtcctagaaaccgccaccatctttgacggccctgaaaccatctaccgctatgacctggctgccgaaggcatccttgatggatgggctcactctgctgtgctggatcaagtgaaacaaatagcaggtgaaaactggccgactgttgagatcgtggtggatggcaccgacaacgtagtcaatgcactcacctccatgtttgcttccaaaggcgtgacctgcggtggggttggagtagaagcacctcccgttgcggaggaaccaccgaaaattaaacggcccacgagtggaaaacaagtccgccagttctacggcatcaagccactacacctgttgttggtcagcatattggttggttctattgctggtatttgggtgatttcgggtttcactgggccagtggactcacggccggtagataaggtggcggagatttcaacgcagggggagacgtcgataagcaatcaaccccaaccccagcccaccgtgctcgtgaccgaggacctgcttattgaggcgccatttggttttgaaatgcgaagcgacgaacagtcgcgctacctggaaggccccgacccgaatctgcgcatccacgtgggcgtcgatccgctgcacggcgcggacgccgcgctggttgccgaagagctgcgccgcctgatcaccgaggatccttcgctggaggaaattcccgcaggggagtggggcgagaaaaccaccatcgactaccgcgaaacacccggcgatggctctcatgtgctgtgggtgacctggtttgacaccgaccgacaactcaacgttgggtgccatagcaaagccgccgaaacccttgttcacaaggcacaatgccgaaatgtgattgagcatctgacgctgaaatgatgccggtttctatccggaat

SEQ ID NO: 2 - protein, 300 aa, Corynebacterium glutamicum
MSTQTITITVLETATIFDGPETIYRYDLAAEGILDGWAHSAVLDQVKQIAGENWPTVEIVVDGTDNVVNALTSMFASKGVTCGGVGVEAPPVAEEPPKIKRPTSGKQVRQFYGIKPLHLLLVSILVGSIAGIWVISGFTGPVDSRPVDKVAEISTQGETSISNQPQPQPTVLVTEDLLIEAPFGFEMRSDEQSRYLEGPDPNLRIHVGVDPLHGADAALVAEELRRLITEDPSLEEIPAGEWGEKTTIDYRETPGDGSHVLWVTWFDTDRQLNVGCHSKAAETLVHKAQCRNVIEHLTLK

SEQ ID NO: 3 - DNA, 513 bp, Corynebacterium glutamicum
  CDS (101)..(490): FRXA01638
tttcactgggccagtggactcacggccggtagataaggtggcggagatttcaacgcagggggagacgtcgataagcaatcaaccccaaccccagcccaccgtgctcgtgaccgaggacctgcttattgaggcgccatttggttttgaaatgcgaagcgacgaacagtcgcgctacctggaaggccccgacccgaatctgcgcatccacgtgggcgtcgatccgctgcacggcgcggacgccgcgctggttgccgaagagctgcgccgcctgatcaccgaggatccttcgctggaggaaattcccgcaggggagtggggcgagaaaaccaccatcgactaccgcgaaacacccggcgatggctctcatgtgctgtgggtgacctggtttgacaccgaccgacaactcaacgttgggtgccatagcaaagccgccgaaacccttgttcacaaggcacaatgccgaaatgtgattgagcatctgacgctgaaatgatgccggtttctatccggaat

SEQ ID NO: 4 - protein, 130 aa, Corynebacterium glutamicum
VLVTEDLLIEAPFGFEMRSDEQSRYLEGPDPNLRIHVGVDPLHGADAALVAEELRRLITEDPSLEEIPAGEWGEKTTIDYRETPGDGSHVLWVTWFDTDRQLNVGCHSKAAETLVHKAQCRNVIEHLTLK

SEQ ID NO: 5 - DNA, 561 bp, Corynebacterium glutamicum
  CDS (101)..(538): FRXA01639
aggcatcaaacccacagcacaaccaccaggacgtgccacgatgtccatccgtggtgaaaacatcggtgttgcacagatggcaccgcataggtgatgactcatgagcacccaaacaatcaccatcacagtcctagaaaccgccaccatctttgacggccctgaaaccatctaccgctatgacctggctgccgaaggcatccttgatggatgggctcactctgctgtgctggatcaagtgaaacaaatagcaggtgaaaactggccgactgttgagatcgtggtggatggcaccgacaacgtagtcaatgcactcacctccatgtttgcttccaaaggcgtgacctgcggtggggttggagtagaagcacctcccgttgcggaggaaccaccgaaaattaaacggcccacgagtggaaaacaagtccgccagttctacggcatcaagccactacacctgttgttggtcagcatattggttggttctattgctggtatttggggatttcgggtttcactgggccagtggactcacggccggtagataaggtggcggagatttca

SEQ ID NO: 6 - protein, 146 aa, Corynebacterium glutamicum
MSTQTITITVLETATIFDGPETIYRYDLAAEGILDGWAHSAVLDQVKQIAGENWPTVEIVVDGTDNVVNALTSMFASKGVTCGGVGVEAPPVAEEPPKIKRPTSGKQVRQFYGIKPLHLLLVSILVGSIAGIWGFRVSLGQWTHGR

SEQ ID NO: 7 - DNA, 6470 bp, Corynebacterium glutamicum
  CDS (1)..(6447): RXN01590
tggggtcaaaaagatcactggggcaaagctccactgggtgatcacgatgctgtgcgtatctataggcaagcagaagccttgatgaaacagcgcgcagcaaacaataagggcttagacctcaatgatgaagcgacctatggcgccatcatgtttgcgtctttcgatgatgccttcgccgctgatgccgaagctcatggctgtgtacaccgaccacagttcgcgaaggtaactaggcgaaatattcttaattcaccgcaatacacggcgattaagtcatcttatgacgcgctggtgcagcaggatctcgtggcccaacagcagcaggcacaagcgctacagcaagctgcttatgagcaagagcaggcagctattttccaggcacgtgatcaagcaacattccaggctgaacaaacgctcgcgcaagagtccgttcgccaatcagagggtgtgggtttacctgtcattgatccgatggagagctatttccgggagtacgccttctatgaaggtgtcgagatgtttggtacctggggtacgcacgttgatgctggtgtgtcgcagtttagcacctctgatggccgtgcgatccgagcgcttgttgatgagcatctcgcaacctatgaaccagtagagcagcgggggagtactcaggcattcttcgcctctgtcaatgctgcctttgctgaggtggcacctcacgcagcacccatgtttagtgcgattgctcgcgagggtgagggttcaaaggggtaccaggcgctgcgtcaccgtttcgacaagatggtcggcactgcaattggacctaatggtttgcctgagggacctgatctgggtggtcgtcgtttacctatttcgccttatgatccacgctggtcagaccgcgaagtagtccgtgtgcacggtaccaagctgctatcactgtccgaagagagtgttggcatgatcagggaccttgatctagcaacgatccacctacaagataatgatgtttacgagggcactcatcgagaagacgacactaaaggcggtgtgcgaccgttgactcaatgggtcaatggtgaagctattgcctggcgcactatcaccgagaatgaccagatgcgactgcccaatattggtcagtttatgacggctaaagaataccgtgccgcagcgtcatggctgcgtgctggactcattgataccgcagatgttgcgagtcagaaaattgaccccaacaaggtcatgtctgatgagggtatcgcgcgctcggaagctattttgacgtatctgtcggatgagggtgtggattttaggatcgagccagatcgtgagccgggacagcttaaagtgcgtattgagggcacccgtattgatattcgtctcactgatactcgcgccaatgaacagtgggtgggtcgtgtctatgattctggcactgtgattaagtattccgccgaacaaacagcggaagaacgtctacgagctcgtgagcgcatggagaacggtgatggaacgtggacaccggctactgattatgaaccaagcccaactgaagttgtcgatctcgtgaaatttgctctcggtcgagaggttgagcgacaggatggcaaaggtcttgttggtgtgcctaatgctcgacacccacgtgctttagagcaggcacaggatgcatatttcactaagaatcgttccgcattcatggtgcgtgaagggctctcgatcgttcaggatgcacgtgatcgaagtgctggtcctggaaagtggtttgataatgaagcgaaagcatcggagtggcttggtaacaatatcgcccttactcgtgcgcgtgtggccgaagagctcggcgttgaagaactgattgcgctttctgcacagtacgccgatgatcctgacttcatgccggcttttgctggtgaggatgagctcatggcgataaagcaggactattgggcgatgctgcgaggtgaggaaaccgatctgcttaaccctggggttaaccgcgatgattatatggctgctatccgcgatggtgatcatgagcagattgctgcgatgacctcagcaatgaatgctgtgaccgtggaggatcgtgtgcgtcagcacgcggcccttgttcttgatgattatgtcggcacggtggagcctgatcctgttaccggcttgcgttttaatccggtgacagttgctcagcacatgccgagtgctaaatccctgtggtcaaaccatgacgatattattgccgcgttgcgagcgacttcgattactggcgatgaactgcgcggtgacgaattctataacgatgttattaatcaacagttgctcaaatttaatcctgagaccgcgcagaaaatggttaataaccctgatcttgacccgcagttggctcgatttggcactgtcattgccgagactatttcccgcaatggtgctgatgtggtcgatattgctgttgacgataacggtgtggtgcggtggaccgcacagcgacgtgttggtgcgaaggatagtcgtgcagtagatagtaaggggcaggttcgcggtgaacgcacccgtcatgtgcagggtgagataggtcagatttttactcgcggtgagcatggtgaaattgtcaccaaatttaatggtggcgagaactatatgtttgcccctggctacaccgcgtctgtggtaccacaaaagcctggtgagacaaagagtttagaagagcgtaccaagctcaaaggctatgagcaggtgatgtcagaggcgttggtgtaccgtgtgcgagaagatttgatgttcactgagcgatcccgagtgggtgctacaaccagcatcaacagtgcatataagcgactgtatgacaatcgcttccctgtggacttcttcgagcgcagcgccgaagaaggtttgagcgatgagtggcgtgctgcgttgcttgagactgcgagtttgcgtgtgcgctacgacaactctattcgtgatggtgcgaatgtgatggaggatattcgagcacagcagcgtggttttgatgcgcgtaatgataactcccgtgatgcgctggtgcttaccggtgggcgtaacatttctgtacttgatgttgatgcgggtaaaggtttctttgatcccatgatgactggtatggcggcgaaccagggttctgttcgctatttgttgccttctgcgaaggtgggcgctgatggcatgattacccctggtgatccggctgatcgagtacctgttgcagcgcatccagaatcatgggcgatgggctttgacccacatgaccgtcagaacatgactttctcgaacatcatgcaggctagcgctgtgactggtggtgcacgcactgcgatgatacagctgggcggttggaactttgaagatggcattattgtctctgccgattttgcgaatacccatgttattcgcgatacggaagatgagatgcgccccttggttgccggcgataagctgtctgattttcacggtaataagggtgtgaccgctcttgttgttgatccagcgatgagtgatgctgatgcacgtgcagcagggctggaatcagaggtggcgtttttccgagacaaccctgatctagaggttgtcatgagtccgttttctgccatttctcgttttaatggtggcacggcacgtgagctcatgaccaacccgcaggatgtggtgttcaggaataatgatggttctactcgtgttcaaccaggtgcctctggtgatctcaacttcatcgtcacgcatatggctgttgatgcgaaaaccaatgtctatgatgaagaagctgttcgtgagggccaaggacgtaaagcgtcttctcagctggcgtgggtgctccaagcccaggaatgtcatgagattatggagcacttttatggcaacaacgtctctgcattggctaacttccaggaatatcttcgcgtcacggggcttgatgtcaccccgtatggtgagttgcgcgaggggttcagcgagtccaatgagcagcgcaatatcatcgagatgccaagcatttacgatgagaacggtgagctgaataatcgtgttaatcgtgcacaggtgcgcgaagcttttgttgagcagatcagtcgcgctggtggtgttatggagattcctttccagttacagttgcgcaatggtgcacagctagaagagtcacctaataatccagacatgtatcagttgccactactgagcccgcatttgcgcagtgatgaggatttagcggacggtagtacctctcgacatgagtacaccacgcggtatatggctatttttgatacgtgctacaagctggcagaagagcaagccaagattgacgcattgcgccaggaggaagcgcagcacggcacgttgcctcgtgctgcggaaaagcgactgagcgagtcacagaagtttgttgatcaagcacagaaaaaggtgcaggcaagctttgatggaattgctaatgatattgtcgccagccggatcgagaccaagaacaatgtgttcaaggacggctttatgtcggcgcgacagtcacactccgctactgctgtgtggacaggtgatccacgcctgtcagttgatgaagtagccatgaactcttcgatggcacgtgaactcggcgttctcgataacggttatgcaatggtgtggcgtgatccggtgatccgcgatggtggtgtgcgctatttgcgtgtggttattaatgatgatctgcacggtgtggcagtcaaccctgtgtcggtgaagagctttgacggtgacttcgatggtgactctgtaggtctggtcggcaatctgccgaaaaaggcgcatgaggaggcattgtccaggctcacagttgaggcaaacatgcttgatcttggtgatggtaagcgtatggaggacggcactatgttttatgggctaactctgcatgacagcctcgatgtacaggtagcgcagcaccatgatccggcaatggccgagaacatgaaggttattgtctctgagcttaaccgctaccagcgtgaatacgaggccggcgagattagccgcgaagaattgctagaggtcaaccgtgcacacatggatgatctcaatgagcactatgcacaggcttttgccaaccgcgatggtttggtgaccttgcgttttgacggtatggaaaaccatatggcttctgttgcgcagtgcttcgagacgggtgcgaaaggttcgcctggcaagctgaaggaatatgccacctatatcggcgctgatccggcgcagggttttaaagacgtaggtcaaccaacgccagaagcgctgcgtagccactatgagggttcgcagaaggcgactgcaattaaggtgctctttaccggtgtggctggtaaaaaagagcaggaaatggtggcattgtgccgcaatcttggtctgaccaaggaagctatggctgcatcagcaccggcacagcagtcgattctgcaggcgaagcacgacccgattgacgcgctctatcgtgcagaaactcttatgggaccagtaggtgatctctaccaaggtcgcaagatgcgtcgtggtgagaatgagcaaggtcgctatgagtgggaagtcgttagggacgagaaccaccagcctatccaggccaccaaggatgaatgggtacagcagtacatggagatgtacgccgatgacaagggtatgggtgtctcggttggcgttgaccaggtggagaagatcgcggaagaattctctgatgagcagggttatatgcgtgtgcttagccatgatgagctacccactgagattaagccactagcacttgatcagcttgcctatggcgataagaagaaccgctttgatttgttgtgcgagatggcaaagcagcaggtcaacatctacgacggtgatgcttatgactttgcccctcgtgtggtgcgcgccaatatgaaggcaatggaggatgcagcgcgttttggtatccctgatgtggagattcagtcgatttctgcacagcagtcattggcgagctttgagcgagtcccacaacgttctggtttccgtattgagcgtcgtgtgccggcagaagtaggtacagggattgctgcaccagcaccgttacctgatgcaggtgtacaggggaattatgttcagcagcaggtgcctgcgaccccgccagttatgcctgtcacacctccggcacagcaacctgtttcgcctgctcagacggacttccggggcgttggtcagccactcgaccagggcggaaaaatcgggaattatggacatcagggacctgcaatgggggcgcaacagccagttgtgcctcagcagcagaatattccgcctgtgcataatccggtaccacagaattctgttccgcctactccggttgtgccgaagccaggtacaggaaacccgtttactcatggtggtgcgaacaatcagtttatgggtcgatttgatacaagccgttacaaccaacaggaaccaccacaacgacaggatggcgggtttgagctctaaataatggcagtagatttcag

SEQ ID NO: 8 - protein, 2149 aa, Corynebacterium glutamicum
WGQKDHWGKAPLGDHDAVRIYRQAEALMKQRAANNKGLDLNDEATYGAIMFASFDDAFAADAEAHGCVHRPQFAKVTRRNILNSPQYTAIKSSYDALVQQDLVAQQQQAQALQQAAYEQEQAAIFQARDQATFQAEQTLAQESVRQSEGVGLPVIDPMESYFREYAFYEGVEMFGTWGTHVDAGVSQFSTSDGRAIRALVDEHLATYEPVEQRGSTQAFFASVNAAFAEVAPHAAPMFSAIAREGEGSKGYQALRHRFDKMVGTAIGPNGLPEGPDLGGRRLPISPYDPRWSDREVVRVHGTKLLSLSEESVGMIRDLDLATIHLQDNDVYEGTHREDDTKGGVRPLTQWVNGEAIAWRTITENDQMRLPNIGQFMTAKEYRAAASWLRAGLIDTADVASQKIDPNKVMSDEGIARSEAILTYLSDEGVDFRIEPDREPGQLKVRIEGTRIDIRLTDTRANEQWVGRVYDSGTVIKYSAEQTAEERLRARERMENGDGTWTPATDYEPSPTEVVDLVKFALGREVERQDGKGLVGVPNARHPRALEQAQDAYFTKNRSAFMVREGLSIVQDARDRSAGPGKWFDNEAKASEWLGNNIALTRARVAEELGVEELIALSAQYADDPDFMPAFAGEDELMAIKQDYWAMLRGEETDLLNPGVNRDDYMAAIRDGDHEQIAAMTSAMNAVTVEDRVRQHAALVLDDYVGTVEPDPVTGLRFNPVTVAQHMPSAKSLWSNHDDIIAALRATSITGDELRGDEFYNDVINQQLLKFNPETAQKMVNNPDLDPQLARFGTVIAETISRNGADVVDIAVDDNGVVRWTAQRRVGAKDSRAVDSKGQVRGERTRHVQGEIGQIFTRGEHGEIVTKFNGGENYMFAPGYTASVVPQKPGETKSLEERTKLKGYEQVMSEALVYRVREDLMFTERSRVGATTSINSAYKRLYDNRFPVDFFERSAEEGLSDEWRAALLETASLRVRYDNSIRDGANVMEDIRAQQRGFDARNDNSRDALVLTGGRNISVLDVDAGKGFFDPMMTGMAANQGSVRYLLPSAKVGADGMITPGDPADRVPVAAHPESWAMGFDPHDRQNMTFSNIMQASAVTGGARTAMIQLGGWNFEDGIIVSADFANTHVIRDTEDEMRPLVAGDKLSDFHGNKGVTALVVDPAMSDADARAAGLESEVAFFRDNPDLEVVMSPFSAISRFNGGTARELMTNPQDVVFRNNDGSTRVQPGASGDLNFIVTHMAVDAKTNVYDEEAVREGQGRKASSQLAWVLQAQECHEIMEHFYGNNVSALANFQEYLRVTGLDVTPYGELREGFSESNEQRNIIEMPSIYDENGELNNRVNRAQVREAFVEQISRAGGVMEIPFQLQLRNGAQLEESPNNPDMYQLPLLSPHLRSDEDLADGSTSRHEYTTRYMAIFDTCYKLAEEQAKIDALRQEEAQHGTLPRAAEKRLSESQKFVDQAQKKVQASFDGIANDIVASRIETKNNVFKDGFMSARQSHSATAVWTGDPRLSVDEVAMNSSMARELGVLDNGYAMVWRDPVIRDGGVRYLRVVINDDLHGVAVNPVSVKSFDGDFDGDSVGLVGNLPKKAHEEALSRLTVEANMLDLGDGKRMEDGTMFYGLTLHDSLDVQVAQHHDPAMAENMKVIVSELNRYQREYEAGEISREELLEVNRAHMDDLNEHYAQAFANRDGLVTLRFDGMENHMASVAQCFETGAKGSPGKLKEYATYIGADPAQGFKDVGQPTPEALRSHYEGSQKATAIKVLFTGVAGKKEQEMVALCRNLGLTKEAMAASAPAQQSILQAKHDPIDALYRAETLMGPVGDLYQGRKMRRGENEQGRYEWEVVRDENHQPIQATKDEWVQQYMEMYADDKGMGVSVGVDQVEKIAEEFSDEQGYMRVLSHDELPTEIKPLALDQLAYGDKKNRFDLLCEMAKQQVNIYDGDAYDFAPRVVRANMKAMEDAARFGIPDVEIQSISAQQSLASFERVPQRSGFRIERRVPAEVGTGIAAPAPLPDAGVQGNYVQQQVPATPPVMPVTPPAQQPVSPAQTDFRGVGQPLDQGGKIGNYGHQGPAMGAQQPVVPQQQNIPPVHNPVPQNSVPPTPVVPKPGTGNPFTHGGANNQFMGRFDTSRYNQQEPPQRQDGGFEL

SEQ ID NO: 9 - DNA, 1307 bp, Corynebacterium glutamicum
  CDS (1)..(1284): FRXA01590
ggcaagttgaaggaatatgccacctatatcggcgctgatccggcgcagggttttaaagacgtaggtcaaccaacgccagaagcgctgcgtagccactatgagggttcgcagaaggcgactgcaattaaggtgctctttaccggtgtggctggtaaaaaagagcaggaaatggtggcattgtgccgcaatcttggtctgaccaaggaagctatggctgcatcagcaccggcacagcagtcgattctgcaggcgaagcacgacccgattgacgcgctctatcgtgcagaaactcttatgggaccagtaggtgatctctaccaaggtcgcaagatgcgtcgtggtgagaatgagcaaggtcgctatgagtgggaagtcgttagggacgagaaccaccagcctatccaggccaccaaggatgaatgggtacagcagtacatggagatgtacgccgatgacaagggtatgggtgtctcggttggcgttgaccaggtggagaagatcgcggaagaattctctgatgagcagggttatatgcgtgtgcttagccatgatgagctacccactgagattaagccactagcacttgatcagcttgcctatggcgataagaagaaccgctttgatttgttgtgcgagatggcaaagcagcaggtcaacatctacgacggtgatgcttatgactttgcccctcgtgtggtgcgcgccaatatgaaggcaatggaggatgcagcgcgttttggtatccctgatgtggagattcagtcgatttctgcacagcagtcattggcgagctttgagcgagtcccacaacgttctggtttccgtattgagcgtcgtgtgccggcagaagtaggtacagggattgctgcaccagcaccgttacctgatgcaggtgtacaggggaattatgttcagcagcaggtgcctgcgaccccgccagttatgcctgtcacacctccggcacagcaacctgtttcgcctgctcagacggacttccggggcgttggtcagccactcgaccagggcggaaaaatcgggaattatggacatcagggacctgcaatgggggcgcaacagccagttgtgcctcagcagcagaatattccgcctgtgcataatccggtaccacagaattctgttccgcctactccggttgtgccgaagccaggtacaggaaacccgtttactcatggtggtgcgaacaatcagtttatgggtcgatttgatacaagccgttacaaccaacaggaaccaccacaacgacaggatggcgggtttgagctctaaataatggcagtagatttcag

SEQ ID NO: 10 - protein, 428 aa, Corynebacterium glutamicum
GKLKEYATYIGADPAQGFKDVGQPTPEALRSHYEGSQKATAIKVLFTGVAGKKEQEMVALCRNLGLTKEAMAASAPAQQSILQAKHDPIDALYRAETLMGPVGDLYQGRKMRRGENEQGRYEWEVVRDENHQPIQATKDEWVQQYMEMYADDKGMGVSVGVDQVEKIAEEFSDEQGYMRVLSHDELPTEIKPLALDQLAYGDKKNRFDLLCEMAKQQVNIYDGDAYDFAPRVVRANMKAMEDAARFGIPDVEIQSISAQQSLASFERVPQRSGFRIERRVPAEVGTGIAAPAPLPDAGVQGNYVQQQVPATPPVMPVTPPAQQPVSPAQTDFRGVGQPLDQGGKIGNYGHQGPAMGAQQPVVPQQQNIPPVHNPVPQNSVPPTPVVPKPGTGNPFTHGGANNQFMGRFDTSRYNQQEPPQRQDGGFEL

SEQ ID NO: 11 - DNA, 5061 bp, Corynebacterium glutamicum
  CDS (1)..(5061): FRXA01542
tggggtcaaaaagatcactggggcaaagctccactgggtgatcacgatgctgtgcgtatctataggcaagcagaagccttgatgaaacagcgcgcagcaaacaataagggcttagacctcaatgatgaagcgacctatggcgccatcatgtttgcgtctttcgatgatgccttcgccgctgatgccgaagctcatggctgtgtacaccgaccacagttcgcgaaggtaactaggcgaaatattcttaattcaccgcaatacacggcgattaagtcatcttatgacgcgctggtgcagcaggatctcgtggcccaacagcagcaggcacaagcgctacagcaagctgcttatgagcaagagcaggcagctattttccaggcacgtgatcaagcaacattccaggctgaacaaacgctcgcgcaagagtccgttcgccaatcagagggtgtgggtttacctgtcattgatccgatggagagctatttccgggagtacgccttctatgaaggtgtcgagatgtttggtacctggggtacgcacgttgatgctggtgtgtcgcagtttagcacctctgatggccgtgcgatccgagcgcttgttgatgagcatctcgcaacctatgaaccagtagagcagcgggggagtactcaggcattcttcgcctctgtcaatgctgcctttgctgaggtggcacctcacgcagcacccatgtttagtgcgattgctcgcgagggtgagggttcaaaggggtaccaggcgctgcgtcaccgtttcgacaagatggtcggcactgcaattggacctaatggtttgcctgagggacctgatctgggtggtcgtcgtttacctatttcgccttatgatccacgctggtcagaccgcgaagtagtccgtgtgcacggtaccaagctgctatcactgtccgaagagagtgttggcatgatcagggaccttgatctagcaacgatccacctacaagataatgatgtttacgagggcactcatcgagaagacgacactaaaggcggtgtgcgaccgttgactcaatgggtcaatggtgaagctattgcctggcgcactatcaccgagaatgaccagatgcgactgcccaatattggtcagtttatgacggctaaagaataccgtgccgcagcgtcatggctgcgtgctggactcattgataccgcagatgttgcgagtcagaaaattgaccccaacaaggtcatgtctgatgagggtatcgcgcgctcggaagctattttgacgtatctgtcggatgagggtgtggattttaggatcgagccagatcgtgagccgggacagcttaaagtgcgtattgagggcacccgtattgatattcgtctcactgatactcgcgccaatgaacagtgggtgggtcgtgtctatgattctggcactgtgattaagtattccgccgaacaaacagcggaagaacgtctacgagctcgtgagcgcatggagaacggtgatggaacgtggacaccggctactgattatgaaccaagcccaactgaagttgtcgatctcgtgaaatttgctctcggtcgagaggttgagcgacaggatggcaaaggtcttgttggtgtgcctaatgctcgacacccacgtgctttagagcaggcacaggatgcatatttcactaagaatcgttccgcattcatggtgcgtgaagggctctcgatcgttcaggatgcacgtgatcgaagtgctggtcctggaaagtggtttgataatgaagcgaaagcatcggagtggcttggtaacaatatcgcccttactcgtgcgcgtgtggccgaagagctcggcgttgaagaactgattgcgctttctgcacagtacgccgatgatcctgacttcatgccggcttttgctggtgaggatgagctcatggcgataaagcaggactattgggcgatgctgcgaggtgaggaaaccgatctgcttaaccctggggttaaccgcgatgattatatggctgctatccgcgatggtgatcatgagcagattgctgcgatgacctcagcaatgaatgctgtgaccgtggaggatcgtgtgcgtcagcacgcggcccttgttcttgatgattatgtcggcacggtggagcctgatcctgttaccggcttgcgttttaatccggtgacagttgctcagcacatgccgagtgctaaatccctgtggtcaaaccatgacgatattattgccgcgttgcgagcgacttcgattactggcgatgaactgcgcggtgacgaattctataacgatgttattaatcaacagttgctcaaatttaatcctgagaccgcgcagaaaatggttaataaccctgatcttgacccgcagttggctcgatttggcactgtcattgccgagactatttcccgcaatggtgctgatgtggtcgatattgctgttgacgataacggtgtggtgcggtggaccgcacagcgacgtgttggtgcgaaggatagtcgtgcagtagatagtaaggggcaggttcgcggtgaacgcacccgtcatgtgcagggtgagataggtcagatttttactcgcggtgagcatggtgaaattgtcaccaaatttaatggtggcgagaactatatgtttgcccctggctacaccgcgtctgtggtaccacaaaagcctggtgagacaaagagtttagaagagcgtaccaagctcaaaggctatgagcaggtgatgtcagaggcgttggtgtaccgtgtgcgagaagatttgatgttcactgagcgatcccgagtgggtgctacaaccagcatcaacagtgcatataagcgactgtatgacaatcgcttccctgtggacttcttcgagcgcagcgccgaagaaggtttgagcgatgagtggcgtgctgcgttgcttgagactgcgagtttgcgtgtgcgctacgacaactctattcgtgatggtgcgaatgtgatggaggatattcgagcacagcagcgtggttttgatgcgcgtaatgataactcccgtgatgcgctggtgcttaccggtgggcgtaacatttctgtacttgatgttgatgcgggtaaaggtttctttgatcccatgatgactggtatggcggcgaaccagggttctgttcgctatttgttgccttctgcgaaggtgggcgctgatggcatgattacccctggtgatccggctgatcgagtacctgttgcagcgcatccagaatcatgggcgatgggctttgacccacatgaccgtcagaacatgactttctcgaacatcatgcaggctagcgctgtgactggtggtgcacgcactgcgatgatacagctgggcggttggaactttgaagatggcattattgtctctgccgattttgcgaatacccatgttattcgcgatacggaagatgagatgcgccccttggttgccggcgataagctgtctgattttcacggtaataagggtgtgaccgctcttgttgttgatccagcgatgagtgatgctgatgcacgtgcagcagggctggaatcagaggtggcgtttttccgagacaaccctgatctagaggttgtcatgagtccgttttctgccatttctcgttttaatggtggcacggcacgtgagctcatgaccaacccgcaggatgtggtgttcaggaataatgatggttctactcgtgttcaaccaggtgcctctggtgatctcaacttcatcgtcacgcatatggctgttgatgcgaaaaccaatgtctatgatgaagaagctgttcgtgagggccaaggacgtaaagcgtcttctcagctggcgtgggtgctccaagcccaggaatgtcatgagattatggagcacttttatggcaacaacgtctctgcattggctaacttccaggaatatcttcgcgtcacggggcttgatgtcaccccgtatggtgagttgcgcgaggggttcagcgagtccaatgagcagcgcaatatcatcgagatgccaagcatttacgatgagaacggtgagctgaataatcgtgttaatcgtgcacaggtgcgcgaagcttttgttgagcagatcagtcgcgctggtggtgttatggagattcctttccagttacagttgcgcaatggtgcacagctagaagagtcacctaataatccagacatgtatcagttgccactactgagcccgcatttgcgcagtgatgaggatttagcggacggtagtacctctcgacatgagtacaccacgcggtatatggctatttttgatacgtgctacaagctggcagaagagcaagccaagattgacgcattgcgccaggaggaagcgcagcacggcacgttgcctcgtgctgcggaaaagcgactgagcgagtcacagaagtttgttgatcaagcacagaaaaaggtgcaggcaagctttgatggaattgctaatgatattgtcgccagccggatcgagaccaagaacaatgtgttcaaggacggctttatgtcggcgcgacagtcacactccgctactgctgtgtggacaggtgatccacgcctgtcagttgatgaagtagccatgaactcttcgatggcacgtgaactcggcgttctcgataacggttatgcaatggtgtggcgtgatccggtgatccgcgatggtggtgtgcgctatttgcgtgtggttattaatgatgatctgcacggtgtggcagtcaaccctgtgtcggtgaagagctttgacggtgacttcgatggtgactctgtaggtctggtcggcaatctgccgaaaaaggcgcatgaggaggcattgtccaggctcacagttgaggcaaacatgcttgatcttggtgatggtaagcgtatggaggacggcactatgttttatgggctaactctgcatgacagcctcgatgtacaggtagcgcagcaccatgatccggcaatggccgagaacatgaaggttattgtctctgagcttaaccgctaccagcgtgaatacgaggccggcgagattagccgcgaagaattgctagaggtcaaccgtgcacacatggatgatctcaatgagcactatgcacaggct

SEQ ID NO: 12 - protein, 1687 aa, Corynebacterium glutamicum
WGQKDHWGKAPLGDHDAVRIYRQAEALMKQRAANNKGLDLNDEATYGAIMFASFDDAFAADAEAHGCVHRPQFAKVTRRNILNSPQYTAIKSSYDALVQQDLVAQQQQAQALQQAAYEQEQAAIFQARDQATFQAEQTLAQESVRQSEGVGLPVIDPMESYFREYAFYEGVEMFGTWGTHVDAGVSQFSTSDGRAIRALVDEHLATYEPVEQRGSTQAFFASVNAAFAEVAPHAAPMFSAIAREGEGSKGYQALRHRFDKMVGTAIGPNGLPEGPDLGGRRLPISPYDPRWSDREVVRVHGTKLLSLSEESVGMIRDLDLATIHLQDNDVYEGTHREDDTKGGVRPLTQWVNGEAIAWRTITENDQMRLPNIGQFMTAKEYRAAASWLRAGLIDTADVASQKIDPNKVMSDEGIARSEAILTYLSDEGVDFRIEPDREPGQLKVRIEGTRIDIRLTDTRANEQWVGRVYDSGTVIKYSAEQTAEERLRARERMENGDGTWTPATDYEPSPTEVVDLVKFALGREVERQDGKGLVGVPNARHPRALEQAQDAYFTKNRSAFMVREGLSIVQDARDRSAGPGKWFDNEAKASEWLGNNIALTRARVAEELGVEELIALSAQYADDPDFMPAFAGEDELMAIKQDYWAMLRGEETDLLNPGVNRDDYMAAIRDGDHEQIAAMTSAMNAVTVEDRVRQHAALVLDDYVGTVEPDPVTGLRFNPVTVAQHMPSAKSLWSNHDDIIAALRATSITGDELRGDEFYNDVINQQLLKFNPETAQKMVNNPDLDPQLARFGTVIAETISRNGADVVDIAVDDNGVVRWTAQRRVGAKDSRAVDSKGQVRGERTRHVQGEIGQIFTRGEHGEIVTKFNGGENYMFAPGYTASVVPQKPGETKSLEERTKLKGYEQVMSEALVYRVREDLMFTERSRVGATTSINSAYKRLYDNRFPVDFFERSAEEGLSDEWRAALLETASLRVRYDNSIRDGANVMEDIRAQQRGFDARNDNSRDALVLTGGRNISVLDVDAGKGFFDPMMTGMAANQGSVRYLLPSAKVGADGMITPGDPADRVPVAAHPESWAMGFDPHDRQNMTFSNIMQASAVTGGARTAMIQLGGWNFEDGIIVSADFANTHVIRDTEDEMRPLVAGDKLSDFHGNKGVTALVVDPAMSDADARAAGLESEVAFFRDNPDLEVVMSPFSAISRFNGGTARELMTNPQDVVFRNNDGSTRVQPGASGDLNFIVTHMAVDAKTNVYDEEAVREGQGRKASSQLAWVLQAQECHEIMEHFYGNNVSALANFQEYLRVTGLDVTPYGELREGFSESNEQRNIIEMPSIYDENGELNNRVNRAQVREAFVEQISRAGGVMEIPFQLQLRNGAQLEESPNNPDMYQLPLLSPHLRSDEDLADGSTSRHEYTTRYMAIFDTCYKLAEEQAKIDALRQEEAQHGTLPRAAEKRLSESQKFVDQAQKKVQASFDGIANDIVASRIETKNNVFKDGFMSARQSHSATAVWTGDPRLSVDEVAMNSSMARELGVLDNGYAMVWRDPVIRDGGVRYLRVVINDDLHGVAVNPVSVKSFDGDFDGDSVGLVGNLPKKAHEEALSRLTVEANMLDLGDGKRMEDGTMFYGLTLHDSLDVQVAQHHDPAMAENMKVIVSELNRYQREYEAGEISREELLEVNRAHMDDLNEHYAQA

SEQ ID NO: 13 - DNA, 2289 bp, Corynebacterium glutamicum
  CDS (101)..(2266): RXN01539
gaacagcacggttgggtgccgcagaattgttgcgtcgttttgaacgcacaggtgcagcagctcagaataatcagtttgacgatatggacttttaaggagtgtggtgacagtggctgggaatgagaagaataagatacgagaagagcgggtggctcggcgtgcccaggcagtcgtagaggcggagattagtcttgctgcacaagcaagtgagcaggtgcgtgaacaagcagaggcgcctgatgtaaatgaacaggtagaagaggttagtgtcgaggtatcttctgtccagtcattaacccagcctaagacgttggggcagctgcatgacccaaggaaaaatgtcatgagtagcagcgacttggcttctattattggtgtagagcaacagcctgttgcttatggtgagtctgaggaaccagaaacactgcgtgatgtgttgcctcggcgaaagcttcacccatctgagataacaccgagttatgaggttgctgatggtgaacagcgcagcatttttggtgaatcagctccgtctgattttgatgacctcagtgatgtcgaagaatttgataccagtcattgggtgcgtgctggacaagatgatcgtagtgatgatgatcgactcgctgatgaggctggtgtaccgcgtagtggcgcacaagatgtagctgataatgaggctaatctttctggtgtggatgagcagctgcacatgcgtgaagtccatgcacagagttttgaccctattgacgttgccaaaaaggaacgcaaagcagcggaaaagaagtatgccaagccaccaaaaagtgataatccgtacctagcacgggatgccaaagatgcagctgctcgtaagcggaagatcaatgcagctcatgataattttgcccaagagatggcacaggctgcgatgggaccactgcgcaaaggggtcaacactcaaacggtgatggccgcgtgtacgactgctgcggtgatgtggtgcatgagcccacgtatgaccggtgtgaacgtggatatgaagcgcaagtttaacaaggatctggaacaggctaaagacactaagttgtcgaagtatgtgtccaaagatttttggaagtcaaagctgacgcgcgataagacggagaaggaagcgaagtcgctctctgatgcgttcatgcagcagaaaacagcgatcatcagcaaccgtgaacgaatccccatgagtgttgcttctgccgcgcagaccgtggttcggttgtctgatcaagcgtatgaggcgatgcgtgaagtagatacggatggtcaagcgatagtggatgcgaaggatgtctctgcacaggtggcagaagatattgacatggtggtcaagcagggtgaagagcatggcctgaagtcgaaggatatttatggcgctgcccgcgatattgtgggtcgtcgcatggagcgcgatccaggctatgctgcccggtttaatgagacggcttttggcaccgtgcgcctgggtgaacaacgacgtggcatggtgatttcaaagaccccgacatggcaattccctgatggtgcaggtttgagtaaaaacgccggctggtttagtgttcgtgagccgatgggtaatgcgcagaacttcgctgacaacctggctgcgactttggcgacagaaatgcgggtagctggtgagcagtacggttccgatggcgttcgtgatgtagttgccggcttcatgacagcgactgatgtctcagaaagtggcctcgcctctgcgaagaaactgttacctgactttgatacacgtggtcgcagtgcttctcgggtgcgccagattgctatggcacagcgcacacaggcagcgatcaaggtgttgcaggatgatggtaatcagaccgcgatgacgactgagcaggtcaaggaggttcaggtatgggcgatggatcaggctgagaaggtgatgcagcgtgatcatccagcgattctggataagtttgtgcgcaaacatgggcagacatttgggcaggatgcggacgcttttgttaaatccataactatggaaaaagacacgagcagcgagtacactgatgctatggttcgacctcaagaaaatcgtggatcaggtcgagaactggcagctcgtcgtcgtgtacaagcagcgcaaatcaatcaggcagcacagctggatatgaatgttcatgatttccgtgaatcgaatctgccagaggaacgacccgcgaatccttatgaagcgtatgttcgtgagactgaagcgaaaaccaatgatccgcagtacggttattaatagaaaatgatagaaagaag

SEQ ID NO: 14 - protein, 722 aa, Corynebacterium glutamicum
VVTVAGNEKNKIREERVARRAQAVVEAEISLAAQASEQVREQAEAPDVNEQVEEVSVEVSSVQSLTQPKTLGQLHDPRKNVMSSSDLASIIGVEQQPVAYGESEEPETLRDVLPRRKLHPSEITPSYEVADGEQRSIFGESAPSDFDDLSDVEEFDTSHWVRAGQDDRSDDDRLADEAGVPRSGAQDVADNEANLSGVDEQLHMREVHAQSFDPIDVAKKERKAAEKKYAKPPKSDNPYLARDAKDAAARKRKINAAHDNFAQEMAQAAMGPLRKGVNTQTVMAACTTAAVMWCMSPRMTGVNVDMKRKFNKDLEQAKDTKLSKYVSKDFWKSKLTRDKTEKEAKSLSDAFMQQKTAIISNRERIPMSVASAAQTVVRLSDQAYEAMREVDTDGQAIVDAKDVSAQVAEDIDMVVKQGEEHGLKSKDIYGAARDIVGRRMERDPGYAARFNETAFGTVRLGEQRRGMVISKTPTWQFPDGAGLSKNAGWFSVREPMGNAQNFADNLAATLATEMRVAGEQYGSDGVRDVVAGFMTATDVSESGLASAKKLLPDFDTRGRSASRVRQIAMAQRTQAAIKVLQDDGNQTAMTTEQVKEVQVWAMDQAEKVMQRDHPAILDKFVRKHGQTFGQDADAFVKSITMEKDTSSEYTDAMVRPQENRGSGRELAARRRVQAAQINQAAQLDMNVHDFRESNLPEERPANPYEAYVRETEAKTNDPQYGY

SEQ ID NO: 15 - DNA, 2046 bp, Corynebacterium glutamicum
  CDS (101)..(2023): FRXA01539
aaatgaacaggtagaagaggttagtgtcgaggtatcttctgtccagtcattaacccagcctaagacgttggggcagctgcatgacccaaggaaaaatgtcatgagtagcagcgacttggcttctattattggtgtagagcaacagcctgttgcttatggtgagtctgaggaaccagaaacactgcgtgatgtgttgcctcggcgaaagcttcacccatctgagataacaccgagttatgaggttgctgatggtgaacagcgcagcatttttggtgaatcagctccgtctgattttgatgacctcagtgatgtcgaagaatttgataccagtcattgggtgcgtgctggacaagatgatcgtagtgatgatgatcgactcgctgatgaggctggtgtaccgcctagtggcgcacaagatgtagctgataatgaggctaatctttctggtgtggatgagcagctgcacatgcgtgaagtccatgcacagagttttgaccctattgacgttgccaaaaaggaacgcaaagcagcggaaaagaagtatgccaagccaccaaaaagtgataatccgtacctagcacgggatgccaaagatgcagctgctcgtaagcggaagatcaatgcagctcatgataattttgcccaagagatggcacaggctgcgatgggaccactgcgcaaaggggtcaacactcaaacggtgatggccgcgtgtacgactgctgcggtgatgtggtgcatgagcccacgtatgaccggtgtgaacgtggatatgaagcgcaagtttaacaaggatctggaacaggctaaagacactaagttgtcgaagtatgtgtccaaagatttttggaagtcaaagctgacgcgcgataagacggagaaggaagcgaagtcgctctctgatgcgttcatgcagcagaaaacagcgatcatcagcaaccgtgaacgaatccccatgagtgttgcttctgccgcgcagaccgtggttcggttgtctgatcaagcgtatgaggcgatgcgtgaagtagatacggatggtcaagcgatagtggatgcgaaggatgtctctgcacaggtggcagaagatattgacatggtggtcaagcagggtgaagagcatggcctgaagtcgaaggatatttatggcgctgcccgcgatattgtgggtcgtcgcatggagcgcgatccaggctatgctgcccggtttaatgagacggcttttggcaccgtgcgcctgggtgaacaacgacgtggcatggtgatttcaaagaccccgacatggcaattccctgatggtgcaggtttgagtaaaaacgccggctggtttagtgttcgtgagccgatgggtaatgcgcagaacttcgctgacaacctggctgcgactttggcgacagaaatgcgggtagctggtgagcagtacggttccgatggcgttcgtgatgtagttgccggcttcatgacagcgactgatgtctcagaaagtggcctcgcctctgcgaagaaactgttacctgactttgatacacgtggtcgcagtgcttctcgggtgcgccagattgctatggcacagcgcacacaggcagcgatcaaggtgttgcaggatgatggtaatcagaccgcgatgacgactgagcaggtcaaggaggttcaggtatgggcgatggatcaggctgagaaggtgatgcagcgtgatcatccagcgattctggataagtttgtgcgcaaacatgggcagacatttgggcaggatgcggacgcttttgttaaatccataactatggaaaaagacacgagcagcgagtacactgatgctatggttcgacctcaagaaaatcgtggatcaggtcgagaactggcagctcgtcgtcgtgtacaagcagcgcaaatcaatcaggcagcacagctggatatgaatgttcatgatttccgtgaatcgaatctgccagaggaacgacccgcgaatccttatgaagcgtatgttcgtgagactgaagcgaaaaccaatgatccgcagtacggttattaatagaaaatgatagaaagaag

SEQ ID NO: 16 - protein, 641 aa, Corynebacterium glutamicum
MSSSDLASIIGVEQQPVAYGESEEPETLRDVLPRRKLHPSEITPSYEVADGEQRSIFGESAPSDFDDLSDVEEFDTSHWVRAGQDDRSDDDRLADEAGVPPSGAQDVADNEANLSGVDEQLHMREVHAQSFDPIDVAKKERKAAEKKYAKPPKSDNPYLARDAKDAAARKRKINAAHDNFAQEMAQAAMGPLRKGVNTQTVMAACTTAAVMWCMSPRMTGVNVDMKRKFNKDLEQAKDTKLSKYVSKDFWKSKLTRDKTEKEAKSLSDAFMQQKTAIISNRERIPMSVASAAQTVVRLSDQAYEAMREVDTDGQAIVDAKDVSAQVAEDIDMVVKQGEEHGLKSKDIYGAARDIVGRRMERDPGYAARFNETAFGTVRLGEQRRGMVISKTPTWQFPDGAGLSKNAGWFSVREPMGNAQNFADNLAATLATEMRVAGEQYGSDGVRDVVAGFMTATDVSESGLASAKKLLPDFDTRGRSASRVRQIAMAQRTQAAIKVLQDDGNQTAMTTEQVKEVQVWAMDQAEKVMQRDHPAILDKFVRKHGQTFGQDADAFVKSITMEKDTSSEYTDAMVRPQENRGSGRELAARRRVQAAQINQAAQLDMNVHDFRESNLPEERPANPYEAYVRETEAKTNDPQYGY

SEQ ID NO: 17 - DNA, 1095 bp, Corynebacterium glutamicum
  CDS (101)..(1072): RXN01422
aatgcattgaaatcgtgatcgcctgttattgttttgtacgtcgaataacagtcccacaacagttccccaaaaggtgcgagcgggaaaaggagaagcaaacatggctcagcgaaaactggcctctgtgatcggtgcagcattggcagcatctgctgtactggttggattaatgacacccgcaacagcacaaagtagtggcagctcatcaacagacatcactcgagcactcacctcaagtggtggtgtggctgatagccgtgctcctgaaggtggcgcaaaggtcgttgttttcggtgactcccacacctctggcaccaatgctccattccgtaccgatgagcgtggctgcctcaagggtgcaaacaactgggcagatcagctgcagtctcagctgggacttggcgcgggagacctcattgatgtctcctgctccggtgcatcgatcaactctgatggattccacttctctgatgaagtccgccatgctgaagctcgtggcgcaatcggcccaaacaccaccgatatttttgttcagttgggcaagaatgatcagtggggcctttccaatgtgaaccttctgcagtctgttcagacctgcttgactgatgtgttcgctggttgtggcgatgctgcggttgctgctggcaagatgcaggatccaaatgcagttactgctgaaaactatgcagagcgcatgaagccagtcattgactacttgaagtactacgcaccaaacgcagagatcaccttggttggttaccaggaatacaccgctcgcagcggaagtcaggtatgtgttcgccttggtggaaccccactggtgaaaaatgatgcacctgcgctggtttcgttcatgaacaagttggacatggcgattgatggtgctgctggaatcctcggcgtcagccacgttgatctgcgtagcgcgactgaagggcacgacagctgctccaacgatccttgggtcaacggtgtctttgatgcacgtgcagaaatcgtcggcggtccgtggcacccatctgttaagggagactcggttactgcagggatcctgcgagatcgagtaaacgcctaaagatgacgtcgaaaagcatt

SEQ ID NO: 18 - protein, 324 aa, Corynebacterium glutamicum
MAQRKLASVIGAALAASAVLVGLMTPATAQSSGSSSTDITRALTSSGGVADSRAPEGGAKVVVFGDSHTSGTNAPFRTDERGCLKGANNWADQLQSQLGLGAGDLIDVSCSGASINSDGFHFSDEVRHAEARGAIGPNTTDIFVQLGKNDQWGLSNVNLLQSVQTCLTDVFAGCGDAAVAAGKMQDPNAVTAENYAERMKPVIDYLKYYAPNAEITLVGYQEYTARSGSQVCVRLGGTPLVKNDAPALVSFMNKLDMAIDGAAGILGVSHVDLRSATEGHDSCSNDPWVNGVFDARAEIVGGPWHPSVKGDSVTAGILRDRVNA

SEQ ID NO: 19 - DNA, 806 bp, Corynebacterium glutamicum
  CDS (1)..(783): FRXA01422
ttcggtgactcccacacctctggcaccaatgctccattccgtaccgatgagcgtggctgcctcaagggtgcaaacaactgggcagatcagctgcagtctcagctgggacttggcgcgggagacctcattgatgtctcctgctccggtgcatcgatcaactctgatggattccacttctctgatgaagtccgccatgctgaagctcgtggcgcaatcggcccaaacaccaccgatatttttgttcagttgggcaagaatgatcagtggggcctttccaatgtgaaccttctgcagtctgttcagacctgcttgactgatgtgttcgctggttgtggcgatgctgcggttgctgctggcaagatgcaggatccaaatgcagttactgctgaaaactatgcagagcgcatgaagccagtcattgactacttgaagtactacgcaccaaacgcagagatcaccttggttggttaccaggaatacaccgctcgcagcggaagtcaggtatgtgttcgccttggtggaaccccactggtgaaaaatgatgcacctgcgctggtttcgttcatgaacaagttggacatggcgattgatggtgctgctggaatcctcggcgtcagccacgttgatctgcgtagcgcgactgaagggcacgacagctgctccaacgatccttgggtcaacggtgtctttgatgcacgtgcagaaatcgtcggcggtccgtggcacccatctgttaagggagactcggttactgcagggatcctgcgagatcgagtaaacgcctaaagatgacgtcgaaaagcatt

SEQ ID NO: 20 - protein, 261 aa, Corynebacterium glutamicum
FGDSHTSGTNAPFRTDERGCLKGANNWADQLQSQLGLGAGDLIDVSCSGASINSDGFHFSDEVRHAEARGAIGPNTTDIFVQLGKNDQWGLSNVNLLQSVQTCLTDVFAGCGDAAVAAGKMQDPNAVTAENYAERMKPVIDYLKYYAPNAEITLVGYQEYTARSGSQVCVRLGGTPLVKNDAPALVSFMNKLDMAIDGAAGILGVSHVDLRSATEGHDSCSNDPWVNGVFDARAEIVGGPWHPSVKGDSVTAGILRDRVNA

SEQ ID NO: 21 - DNA, 771 bp, Corynebacterium glutamicum
  CDS (101)..(748): RXN01403
gtgcgtcgcatacggtgaattatctttcggcggatcgtttccgcacggtgtcgagtttcgtagagtttgcggccgatcgcggtattcaggaattcagccattggtgcgcggtcggggctatttcaatgcggtggatatttatgagacctccacgcaacctgaccaggaatttcctttcgattttgacactttttcagccgaccccacgccgtttcaactctctgcggtgcgtgccgataccggcgagaccgttttttggggcagggaagacaccccggatttgagcgctctgatgaagcgggttcgcgcgtcgtcgaccatgcctggtttcatgccgatcacctacatcgacggccatccatatgtcgatggcgcggtcggggagaccggcggtttgatgctacagccggccatcgatgcgggcttcacccgctttttcgttatcgcctcccgtccgcgcgattattggcgcaaggagatcgggcgcccgggtttcatcaaagctgctttacgacgtttccccacaatcgccgacctcaccatcgcgcgtcctgcactgtataactcggtaaagcaacagatcctcgacctagagaaacaaggcagcgcctatgtgttctttgcggacaacatgaacatccagaacacggaaatcaatctgaagaaactccgtgcatctttcgatgcaggcatgcagcagacccgcaaagattggccggagatcatgagcttcctgaaccaaaccagataatgaaggtttttagtccaact

SEQ ID NO: 22 - protein, 216 aa, Corynebacterium glutamicum
LVRGRGYFNAVDIYETSTQPDQEFPFDFDTFSADPTPFQLSAVRADTGETVFWGREDTPDLSALMKRVRASSTMPGFMPITYIDGHPYVDGAVGETGGLMLQPAIDAGFTRFFVIASRPRDYWRKEIGRPGFIKAALRRFPTIADLTIARPALYNSVKQQILDLEKQGSAYVFFADNMNIQNTEINLKKLRASFDAGMQQTRKDWPEIMSFLNQTR

SEQ ID NO: 23 - DNA, 437 bp, Corynebacterium glutamicum
  CDS (1)..(414): FRXA01403
ccgatcacctacatcgacggccatccatatgtcgatggcgcggtcggggagaccggcggtttgatgctacagccggccatcgatgcgggcttcacccgctttttcgttatcgcctcccgtccgcgcgattattggcgcaaggagatcgggcgcccgggtttcatcaaagctgctttacgacgtttccccacaatcgccgacctcaccatcgcgcgtcctgcactgtataactcggtaaagcaacagatcctcgacctagagaaacaaggcagcgcctatgtgttctttgcggacaacatgaacatccagaacacggaaatcaatctgaagaaactccgtgcatctttcgatgcaggcatgcagcagacccgcaaagattggccggagatcatgagcttcctgaaccaaaccagataatgaaggtttttagtccaact

SEQ ID NO: 24 - protein, 138 aa, Corynebacterium glutamicum
PITYIDGHPYVDGAVGETGGLMLQPAIDAGFTRFFVIASRPRDYWRKEIGRPGFIKAALRRFPTIADLTIARPALYNSVKQQILDLEKQGSAYVFFADNMNIQNTEINLKKLRASFDAGMQQTRKDWPEIMSFLNQTR

SEQ ID NO: 25 - DNA, 489 bp, Corynebacterium glutamicum
  CDS (101)..(466): RXN01326
gtccttgaggctgcttacactctacttattgtagaaatgggagggtcgtggcgtcgaaaagcaaacatcttttaacgcttttggcccgtattatggtggcatggctttccccgtgacagaagacaaaatcctggcagctgaggaaacccttggcaggcgcctccccgaaactttgcgcgaacgactacttcaaaacaatggtggcgaagtcatcgacaatgaaaacaacgactggattctccatccagttcgtgatgacagcgaccgaaaaaggcttgtccgaactgccaacgacatcatccgcgagaccgaatctgcacgtgaatgggacaatttccccgaaaatgcgatcgcaattgcaaatgacggaacgggcgacttaataattctgcttcccgacgatgatgctttctacatctggtcgcacgaagatgaacccctgatcgaaactgaacttgaggatgcctaaaacagctggacagaattcga

SEQ ID NO: 26 - protein, 122 aa, Corynebacterium glutamicum
MAFPVTEDKILAAEETLGRRLPETLRERLLQNNGGEVIDNENNDWILHPVRDDSDRKRLVRTANDIIRETESAREWDNFPENAIAIANDGTGDLIILLPDDDAFYIWSHEDEPLIETELEDA

SEQ ID NO: 27 - DNA, 361 bp, Corynebacterium glutamicum
  CDS (45)..(338): FRXA01326
ccggctggcgctgaggaaaccttggcaggcgcctccccgaaactttgcgcgaacgactacttcaaaacaatggtggcgaagtcatcgacaatgaaaacaacgactggattctccatccagttcgtgatgacagcgaccgaaaaaggcttgtccgaactgccaacgacatcatccgcgagaccgaatctgcacgtgaatgggacaatttccccgaaaatgcgatcgcaattgcaaatgacggaacgggcgacttaataattctgcttcccgacgatgatgctttctacatctggtcgcacgaagatgaacccctgatcgaaactgaacttgaggatgcctaaaacagctggacagaattcga

SEQ ID NO: 28 - protein, 98 aa, Corynebacterium glutamicum
LRERLLQNNGGEVIDNENNDWILHPVRDDSDRKRLVRTANDIIRETESAREWDNFPENAIAIANDGTGDLIILLPDDDAFYIWSHEDEPLIETELEDA

SEQ ID NO: 29 - DNA, 648 bp, Corynebacterium glutamicum
  CDS (101)..(625): RXN01301
aggcaagaacgcaaagttctagtacgctgctaaagtatgcagcttggcccgcacggtttccgcgtgcgggacgtgttcatttctgtataggaaaactaccttgatcgttgatacccagtttgagaagatccctgctcacgacgtcgtgggcatccgggtaatcctttcctctgaggatctccctgagctctttaaacgcggctacgcggaagtaaagaaattcctccgcctagaaggcatcgaacctaaaggtcctgcccgcgcctactactttggcgatgtctctgacaccgtagacatcctgattggtttccccgtcagccccgcgcaagcagaatccctgcgccgcggcgcattgagccaatccggtggcgacatcgatgacgttgtcctccaccacttccgcgacatgaaaaccatgcacagccgccactccggccccttcgatggagtcgagcgcgtctgggacgaaatcctcgatgaagtcgaagacctcggatgcactctgccatccagcagcatcggttgggaagaatacatcgagggcccagccaccgctgatacctgcgaccaactggcctctgaagtttatgttcaggtgtgccaagcaccggtgaagtctgcataaagattcacccggaatttccc

SEQ ID NO: 30 - protein, 175 aa, Corynebacterium glutamicum
LIVDTQFEKIPAHDVVGIRVILSSEDLPELFKRGYAEVKKFLRLEGIEPKGPARAYYFGDVSDTVDILIGFPVSPAQAESLRRGALSQSGGDIDDVVLHHFRDMKTMHSRHSGPFDGVERVWDEILDEVEDLGCTLPSSSIGWEEYIEGPATADTCDQLASEVYVQVCQAPVKSA

SEQ ID NO: 31 - DNA, 428 bp, Corynebacterium glutamicum
  CDS (1)..(405): FRXA01301
ttcctccgcctagaaggcatcgaacctaaaggtcctgcccgcgcctactactttggcgatgtctctgacaccgtagacatcctgattggtttccccgtcagccccgcgcaagcagaatccctgcgccgcggcgcattgagccaatccggtggcgacatcgatgacgttgtcctccaccacttccgcgacatgaaaaccatgcacagccgccactccggccccttcgatggagtcgagcgcgtctgggacgaaatcctcgatgaagtcgaagacctcggatgcactctgccatccagcagcatcggttgggaagaatacatcgagggcccagccaccgctgatacctgcgaccaactggcctctgaagtttatgttcaggtgtgccaagcaccggtgaagtctgcataaagattcacccggaatttccc

SEQ ID NO: 32 - protein, 135 aa, Corynebacterium glutamicum
FLRLEGIEPKGPARAYYFGDVSDTVDILIGFPVSPAQAESLRRGALSQSGGDIDDVVLHHFRDMKTMHSRHSGPFDGVERVWDEILDEVEDLGCTLPSSSIGWEEYIEGPATADTCDQLASEVYVQVCQAPVKSA

SEQ ID NO: 33 - DNA, 567 bp, Corynebacterium glutamicum
  CDS (101)..(544): RXN01276
tgcgtaaaaccctcatcaccatgctcgcgaccaccgcgatcgccttttccgccatctcaccagtgcaggcgcaaaccgtggacacagacactgacgcctcgtgtcatctgagctgagcagcggcacaagctcaggaagttcagaggattccgaagattctgacatctccaaccgggacatcatcttcggcatcgcagctatcgctgcagtcggcggacttatcgcaagtggtgtgcactgggcagtacaacagcgcatgatcccaaatcccctcccaggaatcattccaaatccccctgcactggcacctcaggcgcctgccccagcacctgctcccgctcctgcccctcaggcagtcgcgccccaggttgtcgctccccaggttgtcgcgcctgctccagccccagtacagaccaaccgcacctacaaaaactgcaccgaagtatggaacgtcctgggaaggtccatccgccaaagcgatccaggctacggcacacacctcgaccgcgaccgcgacggcatcggctgcgaatcacgccctaggtagtttgggttttggggatcttc

SEQ ID NO: 34 - protein, 148 aa, Corynebacterium glutamicum
VSSELSSGTSSGSSEDSEDSDISNRDIIFGIAAIAAVGGLIASGVHWAVQQRMIPNPLPGIIPNPPALAPQAPAPAPAPAPAPQAVAPQVVAPQVVAPAPAPVQTNRTYKNCTEVWNVLGRSIRQSDPGYGTHLDRDRDGIGCESRPR

SEQ ID NO: 35 - DNA, 669 bp, Corynebacterium glutamicum
  CDS (101)..(646): FRXA01276
ctagatgcccggaaaatagcatctcctatacacccaaaaaaaaggggagcgctgacagaaaatagtaataattttgacagctcgtgcaaagatgattggcatgcgtaaaaccctcatcaccatgctcgcgaccaccgcgatcgccttttccgccatctcaccagtgcaggcgcaaaccgtggacacagacactgacgcctccgtgtcatctgagctgagcagcggcacaagctcaggaagttcagaggattccgaagattctgacatctccaaccgggacatcatcttcggcatcgcagctatcgctgcagtcggcggacttatcgcaggtggtgtgcactgggcagtacaacagcgcatgatcccaaatcccctcccaggaatcattccaaatccccctgcactggcacctcaggcgcctgccccagcacctgctcccgctcctgcccctcaggcagtcgcgccccaggttgtcgctccccaggttgtcgcgcctgctccagccccagtacagaccaaccgcacctacaaaaactgcaccgaagtatggaacgtcctgggaaggtccatccgccaaagcgatccaggctacggcacacacctcgaccgcgaccgcgacggcatcggctgcgaatcacgccctaggtagtttgggttttggggatcttc

SEQ ID NO: 36 - protein, 182 aa, Corynebacterium glutamicum
MRKTLITMLATTAIAFSAISPVQAQTVDTDTDASVSSELSSGTSSGSSEDSEDSDISNRDIIFGIAAIAAVGGLIAGGVHWAVQQRMIPNPLPGIIPNPPALAPQAPAPAPAPAPAPQAVAPQVVAPQVVAPAPAPVQTNRTYKNCTEVWNVLGRSIRQSDPGYGTHLDRDRDGIGCESRPR

SEQ ID NO: 37 - DNA, 366 bp, Corynebacterium glutamicum
  CDS (101)..(343): RXN01231
tcctgggacgtcttccccgaggcgtgggagacattgaaggtttacctgggctttcgtgccccaggcatcgagcacttcacccccctatgacgccttgcaaatgctgggctacaccttcgtcatctttatcctggcgccgtttctcatcctcaccggaatagcgatggccccggccatccggtcccgcttcccgtggtacgtcaaactcttcggcggccaccagggtgcacgttccctgcacttcatcgccatggtgttgatgacgggctttgtcatcatgcacgtcggcctggttttttggtccatggcgactacaacatggtccacatggtcttcggcgatatgaacactgaccgtgcggcgcag

SEQ ID NO: 38 - protein, 81 aa, Corynebacterium glutamicum
MLGYTFVIFILAPFLILTGIAMAPAIRSRFPWYVKLFGGHQGARSLHFIAMVLMTGFVIMHVGLVFWSMATTTWSTWSSAI

SEQ ID NO: 39 - DNA, 627 bp, Corynebacterium glutamicum
  CDS (101)..(604): FRXA01231
  modified_base (29): a, c, g, or t
  modified_base (284): a, c, g, or t
  modified_base (399): a, c, g, or t
  modified_base (506): a, c, g, or t
  modified_base (541)..(542): a, c, g, or t
  modified_base (544): a, c, g, or t
cctgggacgtcttccccgaggcgtgggangacattgaaggtttacctgggctttcgtgccccaggcatcgagcacttcacccccctatgacgccttgcaaatgctgggctacaccttcgtcatctttatcctggcgccgtttctcatcctcaccggaatagcgatggccccggccatccggtcccgcttcccgtggtacgtcaaactcttcggcggccaccagggtgcacgttccctgcacttcatcgccatggtgttgatgacgggctttgtcatcatgcacngtcggcctggttttttggtccatggcgactacaacatggtccacatggtcttcggcgatatgaacactgaccgtgcggcgcaggcctacatcatcgtgatcaccaccatcgtcantggtggtgttkttctgratcgkgctcagtatattkgtmrctggctkaccgrgmccgcgccmwgcggttyaccgccagcwtcatckgagwtmggwcgcaaaatctttnctcawccggctgcgtccccggatgagcaggcagannancacctacacggacaaggacatctcgcagttccactggaccaatggcctgccgccgaccgatgatgaatcccccgagtggatcg

SEQ ID NO: 40 - protein, 168 aa, Corynebacterium glutamicum
  MOD_RES (62): Cys, Gly, Arg, or Ser
  MOD_RES (100): Ile, Thr, Asn, or Ser
  MOD_RES (104): Val or Phe
  MOD_RES (106): Asp or Asn
  MOD_RES (112): Gly or Cys
  MOD_RES (113): Ser, Arg, Asn, or His
  MOD_RES (117): Gly or Glu
  MOD_RES (118): Thr or Pro
  MOD_RES (121): Ser or Cys
  MOD_RES (123): Leu or Ser
  MOD_RES (130): Ile, Leu, or Phe
  MOD_RES (136): Ser, Pro, Thr, or Ala
  MOD_RES (137): Gln or His
  MOD_RES (147): Asp or Glu
  MOD_RES (148): Tyr, His, Gln, Asn, Lys, Asp, Glu, or not present
MLGYTFVIFILAPFLILTGIAMAPAIRSRFPWYVKLFGGHQGARSLHFIAMVLMTGFVIMHXRPGFLVHGDYNMVHMVFGDMNTDRAAQAYIIVITTIVXGGVXLXRAQYIXXWLTXXAPXGXPPASSEXGRKIFXXPAASPDEQAXXHLHGQGHLAVPLDQWPAADR

SEQ ID NO: 41 - DNA, 954 bp, Corynebacterium glutamicum
  CDS (101)..(931): RXN01210
ttcgctgcaaaacccgccaccttggaatccgtattcatggacatcgcctcactcgagaacacctcgctgcaaaccgcctagaatctttaaggagaccacaatgaccacgtcacacaccgcccgcgggctgcaacatgcaaccccggagcgccgcaagacttcatttttcaaaacctctctgtttaaggccgaatggctccagttccgcagaaataaaaccctgttgttcatggccaccgtattcccagtcggaatccctttgttgctctttctcatcggaaatggtggggcagcagagtccgcgaactccttcgactacttcgtcatgtacaccctgctatttgtgcagttctacacggtgctgtccatggcaaccacccgccgtgatgaacgtgtgctgaaaaggctgcgcacgggagaagcccgcgacatcgatatcatcggtgccatctgtttccccggcgcgctcctcacactgatcttcaccgtggtgatcattccattgctcatggttttgggagctcccgcgcccatcaaccttgtgcccattgtgtttgccgtactgatcggactacttctttgtagtgctcttgccttgatgaccagcggtttcacccgaaacgccgaagccgcacagatgacctccatgcccgtgttcatgcttgcgatgggtggacttggatcaatccgcttcgtattcggcgacagcattgtggctgatatcttggcctacaccccattcgccgcgatcagtgaccttgtccaaatcggctgggctggcgccaccttcgccgacagcgttggtggagtagaggcagcaaacttcgctggaattttccaagacatgctcataccacttggaattctggcagcgtggacagctgcagcggtgtgggcggcgaaccgctacatgcgctgggactcgtaccgctaagcctgcagccgacgggatta

SEQ ID NO: 42 - protein, 277 aa, Corynebacterium glutamicum
MTTSHTARGLQHATPERRKTSFFKTSLFKAEWLQFRRNKTLLFMATVFPVGIPLLLFLIGNGGAAESANSFDYFVMYTLLFVQFYTVLSMATTRRDERVLKRLRTGEARDIDIIGAICFPGALLTLIFTVVIIPLLMVLGAPAPINLVPIVFAVLIGLLLCSALALMTSGFTRNAEAAQMTSMPVFMLAMGGLGSIRFVFGDSIVADILAYTPFAAISDLVQIGWAGATFADSVGGVEAANFAGIFQDMLIPLGILAAWTAAAVWAANRYMRWDSYR

SEQ ID NO: 43 - DNA, 716 bp, Corynebacterium glutamicum
  CDS (1)..(693): FRXA01210
gtattcccagtcggaatccctttgttgctctttctcatcggaaatggtggggcagcagagtccgcgaactccttcgactacttcgtcatgtacaccctgctatttgtgcagttctacacggtgctgtccatggcaaccacccgccgtgatgaacgtgtgctgaaaaggctgcgcacgggagaagcccgcgacatcgatatcatcggtgccatctgtttccccggcgcgctcctcacactgatcttcaccgtggtgatcattccattgctcatggttttgggagctcccgcgcccatcaaccttgtgcccattgtgtttgccgtactgatcggactacttctttgtagtgctcttgccttgatgaccagcggtttcacccgaaacgccgaagccgcacagatgacctccatgcccgtgttcatgcttgcgatgggtggacttggatcaatccgcttcgtattcggcgacagcattgtggctgatatcttggcctacaccccattcgccgcgatcagtgaccttgtccaaatcggctgggctggcgccaccttcgccgacagcgttggtggagtagaggcagcaaacttcgctggaattttccaagacatgctcataccacttggaattctggcagcgtggacagctgcagcggtgtgggcggcgaaccgctacatgcgctgggactcgtaccgctaagcctgcagccgacgggatta

SEQ ID NO: 44 - protein, 231 aa, Corynebacterium glutamicum
VFPVGIPLLLFLIGNGGAAESANSFDYFVMYTLLFVQFYTVLSMATTRRDERVLKRLRTGEARDIDIIGAICFPGALLTLIFTVVIIPLLMVLGAPAPINLVPIVFAVLIGLLLCSALALMTSGFTRNAEAAQMTSMPVFMLAMGGLGSIRFVFGDSIVADILAYTPFAAISDLVQIGWAGATFADSVGGVEAANFAGIFQDMLIPLGILAAWTAAAVWAANRYMRWDSYR

SEQ ID NO: 45 - DNA, 400 bp, Corynebacterium glutamicum
  CDS (101)..(400): RXN01206
ccgtgccagtgatgaaaagccggcgagccgccaaacttgattaagtgattgtcactttggattgtcatattgggcgaataaaccggtaggattccccttcgtgagcgccgaaaataccgagaacacagattccccatttgaaatctccgagtttgatgatcaccgacgccccctccagcgggccctcaaattcggttccatcgccctaattgtcttcaccctgatctccctagcgatctggggtgcaactcgtggcgtacccggcgtatcagcagttgttatcggcgcagcagttggcgcaggctttgtcctcttaacggctctcagcgtcctgtttacaactaattccaacgtcaccaccaccggtgcggtggtgctcggtggctggctgctgaagatc

SEQ ID NO: 46 - protein, 100 aa, Corynebacterium glutamicum
VSAENTENTDSPFEISEFDDHRRPLQRALKFGSIALIVFTLISLAIWGATRGVPGVSAVVIGAAVGAGFVLLTALSVLFTTNSNVTTTGAVVLGGWLLKI

SEQ ID NO: 47 - DNA, 361 bp, Corynebacterium glutamicum
  CDS (101)..(361): FRXA01206
ccgtgccagtgatgaaaagccggcgagccgccaaacttgattaagtgattgtcactttggattgtcatattgggcgaataaaccggtaggattccccttcgtgagcgccgaaaataccgagaacacagattccccatttgaaatctccgagtttgatgatcaccgacgccccctccagcgggccctcaaattcggttccatcgccctaattgtcttcaccctgatctccctagcgatctggggtgcaactcgtggcgtacccggcgtatcagcagttgttatcggcgcagcagttggcgcaggctttgtcctcttaacggctctcagcgtcctgtttacaactaattccaacgtcaccacc

SEQ ID NO: 48 - protein, 87 aa, Corynebacterium glutamicum
VSAENTENTDSPFEISEFDDHRRPLQRALKFGSIALIVFTLISLAIWGATRGVPGVSAVVIGAAVGAGFVLLTALSVLFTTNSNVTT

SEQ ID NO: 49 - DNA, 1209 bp, Corynebacterium glutamicum
  CDS (101)..(1186): RXN01121
aaagatttactgcgtacaactctaaccaacaatattggcaatgggttgttccatcttagcgctttacctgtgaactctgcagagcggtacgcttaagctaatgaatcccgaatttattcacggcgcaaccgaaattgaaaccacaaacaggggccttcgcccgcatcgactcagcaaagaaatagtagaacgctactgtgatccccagtttagcgcgatggaacgccaaccatcgggcgtgcgcgttgtgtgtcgcaccaccgccacctccgtcacgctgaccacgtattccacgcgggtggtgtacctcgattccggccggccgggcggcaagattgatgtgcttatcgacggcgcccccacatcttccacgccaacttccgggggcgagaccacggaagtcaatttcatcaccggcgccacggaacggcgcctgaaagatccgcaggtgctcacagtggatggactttcagagcaggaaaaggtggtggagttctggctgcctcacaatgaagaaattgaagtgatctcccttaaagccaacgcagctttaaacactgtcgaagacacccgtcccgtgtggatcaattacggcagctccattagccacggttcggttgccactgccccaaccaaaatttggccagccattgttgcccagtccaaaaactacaacctgcgtaacttcggttttggtggcagcgccatgttggatccttttatggcgaggctaatcagggatactccagctgatctgatcaccttggaaattggcatcaatattgtcaatggtgatgtgatgcgtcgccgcggactagaggctgctgtggatgggttcatcaataccatccgcgatggccaccccaccacgccgatcaagattgtgtcgccgttctactgccccattcatgagaaaactccaggacccggcgcgtttgatacctcatcgtttggcagtggtcagattaggttcatcgccactggtgaacctgatgagcatggtcgactgacgctggagatggtgcgtgaggtgttggaggggttcgtcgaaaagcaaaaagacccgcacctgacctacgtcgatggtgcgagcctttatcaggccagcgatgcgccgttgctggataatttgcacccagacgaggcgtcgcacgccttaattgcgcagcgtttgcttaagcaactttgaaatcggcttcggtgatttcg

SEQ ID NO: 50 - protein, 362 aa, Corynebacterium glutamicum
MNPEFIHGATEIETTNRGLRPHRLSKEIVERYCDPQFSAMERQPSGVRVVCRTTATSVTLTTYSTRVVYLDSGRPGGKIDVLIDGAPTSSTPTSGGETTEVNFITGATERRLKDPQVLTVDGLSEQEKVVEFWLPHNEEIEVISLKANAALNTVEDTRPVWINYGSSISHGSVATAPTKIWPAIVAQSKNYNLRNFGFGGSAMLDPFMARLIRDTPADLITLEIGINIVNGDVMRRRGLEAAVDGFINTIRDGHPTTPIKIVSPFYCPIHEKTPGPGAFDTSSFGSGQIRFIATGEPDEHGRLTLEMVREVLEGFVEKQKDPHLTYVDGASLYQASDAPLLDNLHPDEASHALIAQRLLKQL

SEQ ID NO: 51 - DNA, 778 bp, Corynebacterium glutamicum
  CDS (101)..(778): FRXA01121
aaagatttactgcgtacaactctaaccaacaatattggcaatgggttgttccatcttagcgctttacctgtgaactctgcagagcggtacgcttaagctaatgaatcccgaatttattcacggcgcaaccgaaattgaaaccacaaacaggggccttcgcccgcatcgactcagcaaagaaatagtagaacgctactgtgatccccagtttagcgcgatggaacgccaaccatcgggcgtgcgcgttgtgtgtcgcaccaccgccacctccgtcacgctgaccacgtattccacgcgggtggtgtacctcgattccggccggccgggcggcaagattgatgtgcttatcgacggcgcccccacatcttccacgccaacttccgggggcgagaccacggaagtcaatttcatcaccggcgccacggaacggcgcctgaaagatccgcaggtgctcacagtggatggactttcagagcaggaaaaggtggtggagttctggctgcctcacaatgaagaaattgaagtgatctcccttaaagccaacgcagctttaaacactgtcgaagacacccgtcccgtgtggatcaattacggcagctccattagccacggttcggttgccactgccccaaccaaaatttggccagccattgttgcccagtccaaaaactacaacctgcgtaacttcggttttggtggcagcgccatgttggatccttttatggcgaggctaatcagggatactccagctgatctgatcaccttggaaattggcatc

SEQ ID NO: 52 - protein, 226 aa, Corynebacterium glutamicum
MNPEFIHGATEIETTNRGLRPHRLSKEIVERYCDPQFSAMERQPSGVRVVCRTTATSVTLTTYSTRVVYLDSGRPGGKIDVLIDGAPTSSTPTSGGETTEVNFITGATERRLKDPQVLTVDGLSEQEKVVEFWLPHNEEIEVISLKANAALNTVEDTRPVWINYGSSISHGSVATAPTKIWPAIVAQSKNYNLRNFGFGGSAMLDPFMARLIRDTPADLITLEIGI

SEQ ID NO: 53 - DNA, 902 bp, Corynebacterium glutamicum
  CDS (1)..(879): RXN01085
cgaaagcgtggtgaaggacttgatcccaactcaccagaagctattgagcaggcgaagaagaaaggggaacggaaggctcgtaatgagcgttgccgcaaaaacttcaaaggtggtggcaccaaagatcttaagcagactgatcggacctttgatcagctgcgaaaacagcgggtgacggataaagcccgcaaccgtgacgtacacaatgagcagcaactggcacgcggtgaaatcggagaaatgcgctcaccgatgtgggttgaggtgggtgctgcgattctgggcgtgtttgtcctggttgtgatgtggctggcctggggcggtatcgggctgctgatccagaccatgatgaatactggctcacctaatgacaaagagctttttgatgagcttggtgtgagaccctattatgttgctgtcgaacagcaaatcggcaccagtagtgctcacaccacgtgctaccaaccgcttgatgaatttggcaataattttggcgactgtacgcgtagcgtgcctaaagagccagtgtggtacgccgattatgtagctagtgtgttcgcagaacatggctttgatgcaccagaacctattgataattcggtgggtagctggctgttatttggtcatgtgggcattattcgggtgacgtttgtgattgcggttgcagcgggtgtgtatgcgatgtcacgcgcagcaatgatgcgtcagctagaaacacaaaacgtcgctgtggacaccaccgatattaaccagcacaccaatgacgcacgtttggcgattccgcaggagattgtgcgcgatttgagtctgttccccgatgtcggtgcacacttcaccagtccagccctcaagcatgatttcccatgtgatgctgtcgaataagggctttgaaaaaggtggat

SEQ ID NO: 54 - protein, 293 aa, Corynebacterium glutamicum
RKRGEGLDPNSPEAIEQAKKKGERKARNERCRKNFKGGGTKDLKQTDRTFDQLRKQRVTDKARNRDVHNEQQLARGEIGEMRSPMWVEVGAAILGVFVLVVMWLAWGGIGLLIQTMMNTGSPNDKELFDELGVRPYYVAVEQQIGTSSAHTTCYQPLDEFGNNFGDCTRSVPKEPVWYADYVASVFAEHGFDAPEPIDNSVGSWLLFGHVGIIRVTFVIAVAAGVYAMSRAAMMRQLETQNVAVDTTDINQHTNDARLAIPQEIVRDLSLFPDVGAHFTSPALKHDFPCDAVE

SEQ ID NO: 55 - DNA, 1057 bp, Corynebacterium glutamicum
  CDS (101)..(1057): FRXA01085
gaagggtcgtaatgagcgttgccgcaaaaacttcaaaggtggtggcaccaaagatcttaagcagactgatcggacctttgatcagctgcgaaaacagcgggtgacggataaagcccgcaaccgtgacgtacacaatgagcagcaactggcacgcggtgaaatcggagaaatgcgctcaccgatgtgggttgaggtgggtgctgcgattctgggcgtgtttgtcctggttgtgatgtggctggcctggggcggtatcgggctgctgatccagaccatgatgaatactggctcacctaatgacaaagagctttttgatgagcttggtgtgagaccctattatgttgctgtcgaacagcaaatcggcaccagtagtgctcacaccacgtgctaccaaccgcttgatgaatttggcaataattttggcgactgtacgcgtagcgtgcctaaagagccagtgtggtacgccgattatgtagctagtgtgttcgcagaacatggctttgatgcaccagaacctattgataattcggtgggtagctggctgttatttggtcatgtgggcattattcgggtgacgtttgtgattgcggttgcagcgggtgtgtatgcgatgtcacgcgcagcaatgatgcgtcagctagaaacacaaaacgtcgctgtggacaccaccgatattaaccagcacaccaatgacgcacgtttggcgattccgcaggagattgtgcgcgatttgagtctgttccccgatgtcggtgcacactcaccagtccagccctcaagcatgatttcccatgtgatgctgtcgaataagggcttgaaaaaggtggatgtaacgcagtttgcacaggagacaattatcgacaatgacactggtgaaattgtctctgaaaagggtgaagtgctctatgacggtgcaggacaaccgatcacaaagagcttgccgatgattgacaacgaatttagccatgcgatttttgacaaatcagatgtcccgaatcttcccgagctgcgacggttctttaatccagcaaagattgagtggaatcctggtggtagt

SEQ ID NO: 56 - protein, 319 aa, Corynebacterium glutamicum
VTDKARNRDVHNEQQLARGEIGEMRSPMWVEVGAAILGVFVLVVMWLAWGGIGLLIQTMMNTGSPNDKELFDELGVRPYYVAVEQQIGTSSAHTTCYQPLDEFGNNFGDCTRSVPKEPVWYADYVASVFAEHGFDAPEPIDNSVGSWLLFGHVGIIRVTFVIAVAAGVYAMSRAAMMRQLETQNVAVDTTDINQHTNDARLAIPQEIVRDLSLFPDVGAHSPVQPSSMISHVMLSNKGLKKVDVTQFAQETIIDNDTGEIVSEKGEVLYDGAGQPITKSLPMIDNEFSHAIFDKSDVPNLPELRRFFNPAKIEWNPGGS

SEQ ID NO: 57 - DNA, 1824 bp, Corynebacterium glutamicum
  CDS (101)..(1801): RXN00022
aggactgctccgcaaacctctaacaacacctgctactccccctgcagcgccggtcaaccccacaccacccaccccttaacaaccacaagaaagatttatcatgtccgctccaaccatctaccccggcaccaaaacatctattgatccgatcaccatggatgacgctcgcatcatctttttcgatattgagtcgctccacaatattttcacggtagcaacctacgattctctgtcccaccacgtcgatgtcttttacctgctcgatcacacaaccagccctcagatcacggtgctgccgcactcaatggattatttcgatcaaacgcgcagcgatgctgttatggctgccatcattgagcaaaaccctgcgttcgcagaaattaaaggctcacccattacaaccgcagatgtagccctccacaatctcggtgacaccaacgccaaccgacgctggcagtctaacgtgctgcttgcccggctactcgggggtattagtgtgcgcggagaggtacctgagcaccagagccacaaccatctcgccaagcagtttgccgaggcaaccttggtcaccagggacttcgatgtgaattatgatccaacaagcgctcacccttttactgctggcttcaactcgatcaactatgacaccaccttgctcagcctgtacttcgcaatgttgacctcaaatatcggaagtacaccgacgtatttcccggtgatcaccgcacaggaacttcgtgcgcataacgacaagctctttagccctgagttcatcaaaaacatgccaaagtatctctgggatcgcgacagcggtgctggactcagagctgcatcgggtttccgcaacgccatgctcaaatcgggtcgccacattgatattcaacgcctcaatgaaaaacagctctttgttggactcaagcgcctgcttggtctcctcggtcaccagattctcgaatctgatcgtctctctggtgatgatgcccatgttgatactaacgaggatgtacttgatctcattgcctacaacgtctcagacgtggtgggcaccagactgctcgctgaggacccggtgtactccggctctttcgatctgcgggcaggtctactgagcacctacccagagactgtttttgatcatgatggtactttccgtcagccatccacgcagatgcgtaaagatcgcctaacgattaatacctcatcagctcagttcgcagcgcgtattttggcgccatatcgcccactccgcgatgtccctgatgcgattggcgacatgccggtggtgtcttacttgtacccggatgcagcagtcgccgaagcaacaggtcaaaaacaagtcaacgtgcttgatgagtcaaagaagttcttctatgacaacatcaccgacccggaagcacgtgctgcctttgatgaggtctttgctttttacgctgatattgagggtcgcaacttcaacagtcacaatgaggctattgatacccagattaaccaattacgtgcttatctcaaccaggttgtcgcattcgatgcagctgggtatgcgctctatgatgtacgtacacgttttgagcagatcttccccaaggatcgcagctacatcaacgatgctacggatatgacccctcgcgcagtatcgagctttgacgatctggttgcactctgtgatgatattcgcggtgtacttgatcgaggtttagagatctcatctccgaatcatcatgagatggtggatgctatgcgcaagcagctgcactatattcaggcattttaccgtgcctgggacccatcaacgccgcttcaatgacgctgacccagcggtgaccc

SEQ ID NO: 58 - protein, 567 aa, Corynebacterium glutamicum
MSAPTIYPGTKTSIDPITMDDARIIFFDIESLHNIFTVATYDSLSHHVDVFYLLDHTTSPQITVLPHSMDYFDQTRSDAVMAAIIEQNPAFAEIKGSPITTADVALHNLGDTNANRRWQSNVLLARLLGGISVRGEVPEHQSHNHLAKQFAEATLVTRDFDVNYDPTSAHPFTAGFNSINYDTTLLSLYFAMLTSNIGSTPTYFPVITAQELRAHNDKLFSPEFIKNMPKYLWDRDSGAGLRAASGFRNAMLKSGRHIDIQRLNEKQLFVGLKRLLGLLGHQILESDRLSGDDAHVDTNEDVLDLIAYNVSDVVGTRLLAEDPVYSGSFDLRAGLLSTYPETVFDHDGTFRQPSTQMRKDRLTINTSSAQFAARILAPYRPLRDVPDAIGDMPVVSYLYPDAAVAEATGQKQVNVLDESKKFFYDNITDPEARAAFDEVFAFYADIEGRNFNSHNEAIDTQINQLRAYLNQVVAFDAAGYALYDVRTRFEQIFPKDRSYINDATDMTPRAVSSFDDLVALCDDIRGVLDRGLEISSPNHHEMVDAMRKQLHYIQAFYRAWDPSTPLQ

SEQ ID NO: 59 - DNA, 835 bp, Corynebacterium glutamicum
  CDS (101)..(835): FRXA00022
aggactgctccgcaaacctctaacaacacctgctactccccctgcagcgccggtcaaccccacaccacccaccccttaacaaccacaagaaagatttatcatgtccgctccaaccatctaccccggcaccaaaacatctattgatccgatcaccatggatgacgctcgcatcatctttttcgatattgagtcgctccacaatattttcacggtagcaacctacgattctctgtcccaccacgtcgatgtcttttacctgctcgatcacacaaccagccctcagatcacggtgctgccgcactcaatggattatttcgatcaaacgcgcagcgatgctgttatggctgccatcattgagcaaaaccctgcgttcgcagaaattaaaggctcacccattacaaccgcagatgtagccctccacaatctcggtgacaccaacgccaaccgacgctggcagtctaacgtgctgcttgcccggctactcgggggtattagtgtgcgcggagaggtacctgagcaccagagccacaaccatctcgccaagcagtttgccgaggcaaccttggtcaccagggacttcgatgtgaattatgatccaacaagcgctcacccttttactgctggcttcaactcgatcaactatgacaccaccttgctcagcctgtacttcgcaatgttgacctcaaatatcggaagtacaccgacgtatttcccggtgatcaccgcacaagaacttcgtgcgcataacgacaagctctttagccctgagttcatcaaaaacatgccaaagtatttctgggatcgcgacagcggtgctggactcagagctgcatcg

SEQ ID NO: 60 - protein, 245 aa, Corynebacterium glutamicum
MSAPTIYPGTKTSIDPITMDDARIIFFDIESLHNIFTVATYDSLSHHVDVFYLLDHTTSPQITVLPHSMDYFDQTRSDAVMAAIIEQNPAFAEIKGSPITTADVALHNLGDTNANRRWQSNVLLARLLGGISVRGEVPEHQSHNHLAKQFAEATLVTRDFDVNYDPTSAHPFTAGFNSINYDTTLLSLYFAMLTSNIGSTPTYFPVITAQELRAHNDKLFSPEFIKNMPKYFWDRDSGAGLRAAS

SEQ ID NO: 61 - DNA, 939 bp, Corynebacterium glutamicum
  CDS (1)..(939): FRXA01921
cacattgatattcaacgcctcaatgaaaaacagctctttgttggactcaagcgcctgcttggtctcctcggtcaccagattctcgaatctgatcgtctctctggtgatgatgcccatgttgatactaacgaggatgtacttgatctcattgcctacaacgtctcagacgtggtgggcaccagactgctcgctgaggacccggtgtactccggctctttcgatctgcgggcaggtctactgagcacctacccagagactgtttttgatcatgatggtactttccgtcagccatccacgcagatgcgtaaagatcgcctaacgattaatacctcatcagctcagttcgcagcgcgtattttggcgccatatcgcccactccgcgatgtccctgatgcgattggcgacatgccggtggtgtcttacttgtacccggatgcagcagtcgccgaagcaacaggtcaaaaacaagtcaacgtgcttgatgagtcaaagaagttcttctatgacaacatcaccgacccggaagcacgtgctgcctttgatgaggtctttgctttttacgctgatattgagggtcgcaacttcaacagtcacaatgaggctattgatacccagattaaccaattacgtgcttatctcaaccaggttgtcgcattcgatgcagctgggtatgcgctctatgatgtacgtacacgttttgagcagatcttccccaaggatcgcagctacatcaacgatgctacggatatgacccctcgcgcagtatcgagctttgacgatctggttgcactctgtgatgatattcgcggtgtacttgatcgaggtttagagatctcatctccgaatcatcatgagatggtggatgctatgcgcaagcagctgcactatattcaggcatttaccgtgcctgggacccatcaacgccgcttcaatgacgct

SEQ ID NO: 62 - protein, 313 aa, Corynebacterium glutamicum
HIDIQRLNEKQLFVGLKRLLGLLGHQILESDRLSGDDAHVDTNEDVLDLIAYNVSDVVGTRLLAEDPVYSGSFDLRAGLLSTYPETVFDHDGTFRQPSTQMRKDRLTINTSSAQFAARILAPYRPLRDVPDAIGDMPVVSYLYPDAAVAEATGQKQVNVLDESKKFFYDNITDPEARAAFDEVFAFYADIEGRNFNSHNEAIDTQINQLRAYLNQVVAFDAAGYALYDVRTRFEQIFPKDRSYINDATDMTPRAVSSFDDLVALCDDIRGVLDRGLEISSPNHHEMVDAMRKQLHYIQAFTVPGTHQRRFNDA

SEQ ID NO: 63 - DNA, 489 bp, Corynebacterium glutamicum
  CDS (101)..(466): RXN00027
ttaggcaacgactccgaaaccttcaagaacgtgtggcactaacaattgcggactatccttgggaactgttttagattttattcagggtagggagattgttgtggatgaacgaagccggtttgcgcgcagcgttttcccggacggtgaagaaccagatccacgtttcactttggccaatgagcgcacgtttctagcatggacgcgtacgtctttggcgtttcttgccggtggtattgcttttgaggcgttccagatcagtggactatcggatactgtccgtacaacaatcgcggtttttatcattgcggttggcatgatcattgccgctggtgctgcggtgaggtggatgaatgtggagcgtgcaatgcgtaaacagaagccacttcccgtacctgcgattattccgtttctgtctattgcggctttggtggcctctgcggctgtcttggttctgattattgttcagtagctatgcgcattcatgaggat

SEQ ID NO: 64 - protein, 122 aa, Corynebacterium glutamicum
VDERSRFARSVFPDGEEPDPRFTLANERTFLAWTRTSLAFLAGGIAFEAFQISGLSDTVRTTIAVFIIAVGMIIAAGAAVRWMNVERAMRKQKPLPVPAIIPFLSIAALVASAAVLVLIIVQ

SEQ ID NO: 65 - DNA, 489 bp, Corynebacterium glutamicum; identical to SEQ ID NO: 63
  CDS (101)..(466): FRXA00027

SEQ ID NO: 66 - protein, 122 aa, Corynebacterium glutamicum; identical to SEQ ID NO: 64

SEQ ID NO: 67 - DNA, 2070 bp, Corynebacterium glutamicum
  CDS (101)..(2047): RXN00028
aaaagtcctggccagaaaactctctatactgtgcagcatggcaccaacgatcaccgacatccatgttctgcttcgtcgcggtgagcgacaatcagtgatcatgaccctcactgcctcttccttggaggccgggaaaatgtcttttagtggcgggtatatcgtgggcgagacgatgatcttcctcgtcgatcccgatgaagtcgagatacgacgcagccctaacagcctccacgtcctgcgtaacggtagcgatattctgcgccgcaacgagcatcattgctgggtatttgagaatttcaataaacccattgacccacctgttcgattgggtcctcgggatatcatctgcccgagcgccttggcctgggttcttcaacagcattccatctcccggtccttatcccaccaccttcacgcggataagatcactgcgggagagattgctggacgccccacctggatcctccgtgaggaacctacttcaggagggcaggacccaagtcgattggtcagtcttgaaatcgaccaggaacacggtgtcatccttgcagtggagactggacaagaacgactcgaagccacggagatttcttttcctgacactcttcctaatccttcctgggacggagcctgggaaccattccattatccagattcgacaccacacactgcccctgatgttgctgaaatacccggttacattcagtcactgccgccgcagtctgaagatcctcgcagactacgagtcttcgtcaatgagatagcactcgaaggtgatttccctgactaccgtcaaggacaatctgtgcgacttactttgggaattagctcctcccctgtgccactcgaaggaatgacaaccagacgccggggccgggtacgcaaccttggggaagaagctagtccaggcgatgacggtatgccccagtggccaatcctgctcactggtgatgggtggacggcgctggcctacactcccatcccaaaacgtggagatgcagagatccaggggtggttttattattccgcctacggaattgttgatgttcccacagatctacgggtagagcgtattttcgctggtatcggcacaagtggcaccaacgagcgtttgtggcaggagatagacaatacttcttcggcttatcactcggaagattggtggatccgcgatgtcgttttagacgtcacgttggatggagctgttccgcctccgcttagacgtgacgtcttcactgctgtcgatcctattgtggcgggtgacaaattgtggctgtgtgacgtgcactttccggtagcccgctgctgggagaccacgaccggccgatacttggggcagactttagtcccagcaccactgcgagatcgatcgtacgtccttgagctgcacagcgaccaacaattaggagccgtagcggcaagtgggaagagtggttggattctcacacctggtcaagcagtagccactaaagctcctgattggactcctcccacccgggcaaccgatctgcctcaggtcccctccccctgggagatcgtcgctgtccgtggccaaggtctgtttgagctgcaggtggaaactagtagacgcaccgccctcggtcgagttaatgcgaccggtggcgtcgacatcggtgaactcccgcccaacggctataccatcagttctgtggttcagatcggtgatgaatacatcgtgggcaggtgggtagaggaataccggctcaactccaaactggaggtcatttctaccaaagagctagatatctccgcatccggatggaagagcaaggggacggttgcttatctgtcggaagacactcacatatgtttcttcgaccaggtcagcggggccgagcttcccagcctgggtatcgccgagggacaccagggcgaggttatgtcagcaacttcttcagagagcatcgtgcttatctaccggcgcaacccgaacaattcaatgtcgattgtcccgacttccgttgccacctatgacaatggcacctggacgactatgccgctacaggaagctccagcggaactgtcctaaactgctcatagactgctgag

SEQ ID NO: 68 - protein, 649 aa, Corynebacterium glutamicum
MTLTASSLEAGKMSFSGGYIVGETMIFLVDPDEVEIRRSPNSLHVLRNGSDILRRNEHHCWVFENFNKPIDPPVRLGPRDIICPSALAWVLQQHSISRSLSHHLHADKITAGEIAGRPTWILREEPTSGGQDPSRLVSLEIDQEHGVILAVETGQERLEATEISFPDTLPNPSWDGAWEPFHYPDSTPHTAPDVAEIPGYIQSLPPQSEDPRRLRVFVNEIALEGDFPDYRQGQSVRLTLGISSSPVPLEGMTTRRRGRVRNLGEEASPGDDGMPQWPILLTGDGWTALAYTPIPKRGDAEIQGWFYYSAYGIVDVPTDLRVERIFAGIGTSGTNERLWQEIDNTSSAYHSEDWWIRDVVLDVTLDGAVPPPLRRDVFTAVDPIVAGDKLWLCDVHFPVARCWETTTGRYLGQTLVPAPLRDRSYVLELHSDQQLGAVAASGKSGWILTPGQAVATKAPDWTPPTRATDLPQVPSPWEIVAVRGQGLFELQVETSRRTALGRVNATGGVDIGELPPNGYTISSVVQIGDEYIVGRWVEEYRLNSKLEVISTKELDISASGWKSKGTVAYLSEDTHICFFDQVSGAELPSLGIAEGHQGEVMSATSSESIVLIYRRNPNNSMSIVPTSVATYDNGTWTTMPLQEAPAELS

SEQ ID NO: 69 - DNA, 2070 bp, Corynebacterium glutamicum
  CDS (101)..(2047): FRXA00028
aaaagtcctggccagaaaactctctatactgtgcagcatggcaccaacgatcaccgacatccatgttctgcttcgtcgcggtgagcgacaatcagtgatcatgaccctcactgcctcttccttggaggccgggaaaatgtcttttagtggcgggtatatcgtgggcgagacgatgatcttcctcgtcgatcccgatgaagtcgagatacgacgcagccctaacagcctccacgtcctgcgtaacggtagcgatattctgcgccgcaacgagcatcattgctgggtatttgagaatttcaataaacccattgacccacctgttcgattgggtcctcgggatatcatctgcccgagcgccttggcctgggttcttcaacagcattccatctcccggtccttatcccaccaccttcacgcggataagatcactgcgggagagattgctggacgccccacctggatcctccgtgaggaacctacttcaggagggcaggacccaagtcgattggtcagtcttgaaatcgaccaggaacacggtgtcatccttgcagtggagactggacaagaacgactcgaagccacggagatttcttttcctgacactcttcctaatccttcctgggacggagcctgggaaccattccattatccagattcgacaccacacactgcccctgatgttgctgaaatacccggttacattcagtcactgccgccgcagtctgaagatcctcgcagactacgagtcttcgtcaatgagatagcactcgaaggtgatttccctgactaccgtcaaggacaatctgtgcgacttactttgggaattagctcctcccctgtgccactcgaaggaatgacaaccagacgccggggccgggtacgcaaccttggggaagaagctagtccaggcgatgacggtatgccccagtggccaatcctgctcactggtgatgggtggacggcgctggcctacactcccatcccaaaacgtggagatgcagagatccaggggtggttttattattccgcctacggaattgttgatgttcccacagatctacgggtagagcgtattttcgctggtatcggcacaagtggcaccaacgagcgtttgtggcaggagatagacaatacttcttcggcttatcactcggaagattggtggatccgcgatgtcgttttagacgtcacgttggatggagctgttccgcctccgcttagacgtgacgtcttcactgctgtcgatcctattgtggcgggtgacaaattgtggctgtgtgacgtgcactttccggtagcccgctgctgggagaccacgaccggccgatacttggggcagactttaktcccagcaccactgcgagatcgatcgtacgtccttgagctgcacagcgaccaacaattaggagccgtagcggcaagtgggaagagtggttggattctcacacctggtcaagcagtagccactaaagctcctgattggactcctcccacccgggcaaccgatctgcctcaggtcccctccccctgggagatcgtcgctgtccgtggccaaggtctgtttgagctgcaggtggaaactagtagacgcaccgccctcggtcgagttaatgcgaccggtggcgtcgacatcggtgaactcccgcccaacggctataccatcagttctgtggttcagatcggtgatgaatacatcgtgggcaggtgggtagaggaataccggctcaactccaaactggaggtcatttctaccaaagagctagatatctccgcatccggatggaagagcaaggggacggttgcttatctgtcggaagacactcacatatgtttcttcgaccaggtcagcggggccgagcttcccagcctgggtatcgccgagggacaccagggcgaggttatgtcagcaacttcttcagagagcatcgtgcttatctaccggcgcaacccgaacaattcaatgtcgattgtcccgacttccgttgccacctatgacaatggcacctggacgactatgccgctacaggaagctccagcggaactgtcctaaactgctcatagactgctgag

SEQ ID NO: 70 - protein, 649 aa, Corynebacterium glutamicum
  MOD_RES (416): Val or Phe
MTLTASSLEAGKMSFSGGYIVGETMIFLVDPDEVEIRRSPNSLHVLRNGSDILRRNEHHCWVFENFNKPIDPPVRLGPRDIICPSALAWVLQQHSISRSLSHHLHADKITAGEIAGRPTWILREEPTSGGQDPSRLVSLEIDQEHGVILAVETGQERLEATEISFPDTLPNPSWDGAWEPFHYPDSTPHTAPDVAEIPGYIQSLPPQSEDPRRLRVFVNEIALEGDFPDYRQGQSVRLTLGISSSPVPLEGMTTRRRGRVRNLGEEASPGDDGMPQWPILLTGDGWTALAYTPIPKRGDAEIQGWFYYSAYGIVDVPTDLRVERIFAGIGTSGTNERLWQEIDNTSSAYHSEDWWIRDVVLDVTLDGAVPPPLRRDVFTAVDPIVAGDKLWLCDVHFPVARCWETTTGRYLGQTLXPAPLRDRSYVLELHSDQQLGAVAASGKSGWILTPGQAVATKAPDWTPPTRATDLPQVPSPWEIVAVRGQGLFELQVETSRRTALGRVNATGGVDIGELPPNGYTISSVVQIGDEYIVGRWVEEYRLNSKLEVISTKELDISASGWKSKGTVAYLSEDTHICFFDQVSGAELPSLGIAEGHQGEVMSATSSESIVLIYRRNPNNSMSIVPTSVATYDNGTWTTMPLQEAPAELS

SEQ ID NO: 71 - DNA, 1458 bp, Corynebacterium glutamicum
  CDS (101)..(1435): RXN00033
acacggatttaacgtgacggtttctcagtgtttttagcttctggcttttggcttctgatgctttagcgctggactcaacatttaaaacaaaggtgaacacatgtcagtacagcaaagcgggttgctcgaacgtctcggcattccccgacccttgattttcggatttatcggcctcaccatcttcatgatcggtgacggtgtcgaaaccaacattttggaacctttcctcagttccgaacatggtttcagcgtttccctcgcgggaaccctggtgactgtttacggtgttgccgtggcgatcgcagcattcttcgcggcggcactttcggacctgtggggtccacgaaaagtgatgatcctcggtgcttcaatctggatcgtctttgagctgatcttcctcaccgtggcactgaccaccgaccatacttggttgatcttccttgcttatggtctccgcggctttggttatccattcttcgcctacggattcttggtgtggatcaccgcaactgcctcacctaagcaattgggtaccggtgtgggttggttctacgttgccttctctgcaggtcttcctaccttgggtgcgctggttgccaccatttccatgcagtacgtgaacttgaccttctatgaaacgttgtgggtttccctcgtgctggtggtcatcggatcgctcatcgcactgctgggagtgaaggaacgtcgcggacgccacccactggttgccaaccccgacgatgtgaagcaaacacttggccagggcttcaaacttctgcgcaatgatcgacgtgcacgttttgtcacctacatccgcaccatcaactccattccgacctacgcgatggctgtgttcttcccatcatttttcactgacgatctgaagtggcagctaagctggttcctcatcctcaccactgtaatttacgcagtcaacctgccgttcaatcctttcttcggtagcttcggcgaccgccacggttgggcacgaactgtgttctggggcggatcaatcggtggcgcagtcaccctcgcgttggtttacttcattccgatgttcggcgttcaggctggcatgtccaacggtgtcgttttcggaatcaccatcgcagccggcgcactctttggtgtgtccctcgcgggcttcgtgccactttccgcaatcgctgtctcccttgatcccaagcaccccggcgcagcgatggccacatacaacctcggcgttggtggcgctgtagctgtgggaccgctcctggttgcagtcttccacccactgattggtccaaccggattgatcctggtcatgatcgccctctacctgctctccggttggatgactcttcaacttcgcggcacccaaccaggattcgacggagtgccagcacttgctgaagacgcccacatcgaagaccttgcagatgtaaacgcaaacgcctaactgtttttcgagctaaaccc

SEQ ID NO: 72 - protein, 445 aa, Corynebacterium glutamicum
MSVQQSGLLERLGIPRPLIFGFIGLTIFMIGDGVETNILEPFLSSEHGFSVSLAGTLVTVYGVAVAIAAFFAAALSDLWGPRKVMILGASIWIVFELIFLTVALTTDHTWLIFLAYGLRGFGYPFFAYGFLVWITATASPKQLGTGVGWFYVAFSAGLPTLGALVATISMQYVNLTFYETLWVSLVLVVIGSLIALLGVKERRGRHPLVANPDDVKQTLGQGFKLLRNDRRARFVTYIRTINSIPTYAMAVFFPSFFTDDLKWQLSWFLILTTVIYAVNLPFNPFFGSFGDRHGWARTVFWGGSIGGAVTLALVYFIPMFGVQAGMSNGVVFGITIAAGALFGVSLAGFVPLSAIAVSLDPKHPGAAMATYNLGVGGAVAVGPLLVAVFHPLIGPTGLILVMIALYLLSGWMTLQLRGTQPGFDGVPALAEDAHIEDLADVNANA

SEQ ID NO: 73 - DNA, 873 bp, Corynebacterium glutamicum
  CDS (101)..(850): RXN00056
atatgaatttaataatagattccgaacgaaatcggtgttagcgtctgtgctgaaacaatctaatcgcgtttcaggacacctacatgatcaggagctctttttgttaaacagagtcagtcgtattgcaggcgcttctgcaatcacactatgcatcggcttaaccacaatactaagccctacttccactgcacaaagcctcgaacagatcacccctttacctgaatctgcaatcgacctcaacgccgagattcacgtaaacacaagcgacatttcagctgaacagatccttggtgctcaagatgaaatcacaactatgtacgattctcatgacccctacgagtacttcgataccctcaccgacatcgaacagcgttcaataatagcagcgcttaaacgggatccgagttcactccaacaacgccaagaaacccgtctcgcggcacagtccgacccctacaaaatttacatatcaggcctcgaaatgctttcatgcatcaatctagttgatgttgtatcatgcgggattgcaaaccaagcagcaaccaaagcaaataatgaggctgtcgcacgatacccaggcgattcccttcgcaacggcaaaggcgatgcatttcggcattgctcatggaacgctctgatgacgatacgaatcgggagcaatggagctgaaagaattgcaacaaaccacgagacaatcggggacggtccggccgatgaaaatgcaatggacctattcaataatgcacaaggccgacagatcggagccggattcattaatagtaaggatgaaactagcgcgctcgcgatatgcgcgctgtggacaaatctcggtagactaaaaactctaaaataagcaaggtgccctctgatgct

SEQ ID NO: 74 - protein, 250 aa, Corynebacterium glutamicum
LLNRVSRIAGASAITLCIGLTTILSPTSTAQSLEQITPLPESAIDLNAEIHVNTSDISAEQILGAQDEITTMYDSHDPYEYFDTLTDIEQRSIIAALKRDPSSLQQRQETRLAAQSDPYKIYISGLEMLSCINLVDVVSCGIANQAATKANNEAVARYPGDSLRNGKGDAFRHCSWNALMTIRIGSNGAERIATNHETIGDGPADENAMDLFNNAQGRQIGAGFINSKDETSALAICALWTNLGRLKTLK

SEQ ID NO: 75 - DNA, 873 bp, Corynebacterium glutamicum; identical to SEQ ID NO: 73
  CDS (101)..(850): FRXA00056

SEQ ID NO: 76 - protein, 250 aa, Corynebacterium glutamicum; identical to SEQ ID NO: 74

SEQ ID NO: 77 - DNA, 609 bp, Corynebacterium glutamicum
  CDS (101)..(586): RXN00067
ggaatcccgcatgttgggctccagttggggactgactctgtttttgatcattttgacgccaatcattattttcctcactttcagctaaaaggaccatgcaatggtagacgctcagcgccccaaagcaggcatcttcggtagccacacagaagaaacatgggtgtggctcggtaatgaacttttcgacgagtccggcgaggtcatcgccgacgttcgctccgacgtcctctacgtggatcgcgaacgactactcatcgaatccacccccggcaccatgcgttttcgttgccgcgcaacactgtccgggggtgaggtctatacgatgactcagaattctttcactgtgggggatctcactgcggtgtgcgggcgccggacgtattcactaaaaagggtgtcgccgtggcgtaaagaacgcctgatcaccaacaatggggtggaagtggcgcggcttcgcccgatgaccagcggtaaagtcgaattcattgtgggcaccgcgggcagcgaggcgttgccgttcgtcgacgcagtatttttgagctgggcgtgcgtcctggtggattcggccgtgcgccggccgaaaatttaaaagctttttgcttatcgacg

SEQ ID NO: 78 - protein, 162 aa, Corynebacterium glutamicum
MVDAQRPKAGIFGSHTEETWVWLGNELFDESGEVIADVRSDVLYVDRERLLIESTPGTMRFRCRATLSGGEVYTMTQNSFTVGDLTAVCGRRTYSLKRVSPWRKERLITNNGVEVARLRPMTSGKVEFIVGTAGSEALPFVDAVFLSWACVLVDSAVRRPKI

SEQ ID NO: 79 - DNA, 609 bp, Corynebacterium glutamicum; identical to SEQ ID NO: 77
  CDS (101)..(586): FRXA00067

SEQ ID NO: 80 - protein, 162 aa, Corynebacterium glutamicum; identical to SEQ ID NO: 78

SEQ ID NO: 81 - DNA, 1485 bp, Corynebacterium glutamicum
  CDS (101)..(1462): RXN00077
ctaaattgttttaacgcgtgaagcagtccccgcccgatttattcgaggcggggactttcgctttccgggataaaaattgcaacgcactacactgagcagtatgaatgatgagaatattcaaagctccaactatcagccattcccgagttttgacgattggaaacagatcgaggtgtcgctcttagatgtcatcgaatcctcacgccatttttctgatttgaaagatagcactgatcgttctgcgttagatgctgcgctagagagagcaaaaagagctgccgcagttgataccaatgccatagaaggaatcttccaaactgatcgcggttttacccatacagttgcaacgcaggtaggggcttgggagcaacaaatggcgatgaaaggcaaacatgttaagcctgcgtttgacgatactctagaaggctttgagtatgttctcgatgcagtaactggtagaactccaatctctcagcaatggattagaaatttgcacgccgtcattctgcggagccaagaaagccacgaggtttttacagccgttggagtccaaaatcaggcgcttcagaaaggcgagtataaaactcagccaaatagtccacagcgctcagatggatctgtacatgcatacgccccagttgaagatactcctgctgaaatggctagatttatttcagaacttgaatctaaggaattcttagcagccgagaaggttattcaagctgcctatgcccactatgctttcgtatgtattcatccttttgcagatgggaatggacgagttgcacgagccttggctagtgtttttctatacaaagatcctggtgtccctctcgtaatctaccaagatcaacgcagagattacatccatgctctagaagcagcggacaagaataacccgctcctgctgattagattctttgctgaacgagtgaccgatactattaactctattatcgttgatctcactaccccgatcgcgggtaaatctggttcggctaagctttcggatgcgctacgccccactcgcgtattaccagaattacatgatgctgcacataggctccaagaaagtttatttacagaaatccgatctcgattggatgaagaaggaaaaaggaatgggttggagtttctacttcaacggatttttatcggttccccattcaatctgccagagggctataacgctttccctgatagctattgtctgaccttagctttcaatagcaactctccaaaacaaatcttccacccgctatccatagtaatagcagctcgagatgggaaaagagcgagcagcgacctcgtggcagctacttctattggatacaactttcacgcttacggacgtgaagtcgagcctgttgttactgaaagctttcgagaacgtgtgaaaatttacgccgacgggattgtagatcacttcttaaccgaactggctaaaaagtttcaacagaattaattagcctatctcggctttcg

SEQ ID NO: 82 - protein, 454 aa, Corynebacterium glutamicum
MNDENIQSSNYQPFPSFDDWKQIEVSLLDVIESSRHFSDLKDSTDRSALDAALERAKRAAAVDTNAIEGIFQTDRGFTHTVATQVGAWEQQMAMKGKHVKPAFDDTLEGFEYVLDAVTGRTPISQQWIRNLHAVILRSQESHEVFTAVGVQNQALQKGEYKTQPNSPQRSDGSVHAYAPVEDTPAEMARFISELESKEFLAAEKVIQAAYAHYAFVCIHPFADGNGRVARALASVFLYKDPGVPLVIYQDQRRDYIHALEAADKNNPLLLIRFFAERVTDTINSIIVDLTTPIAGKSGSAKLSDALRPTRVLPELHDAAHRLQESLFTEIRSRLDEEGKRNGLEFLLQRIFIGSPFNLPEGYNAFPDSYCLTLAFNSNSPKQIFHPLSIVIAARDGKRASSDLVAATSIGYNFHAYGREVEPVVTESFRERVKIYADGIVDHFLTELAKKFQQN

SEQ ID NO: 83 - DNA, 1485 bp, Corynebacterium glutamicum; identical to SEQ ID NO: 81
  CDS (101)..(1462): FRXA00077

SEQ ID NO: 84 - protein, 454 aa, Corynebacterium glutamicum; identical to SEQ ID NO: 82

SEQ ID NO: 85 - DNA, 1653 bp, Corynebacterium glutamicum
  CDS (101)..(1630): RXN00080
atgttcttgtttccctcatgatgagctccgtggtctacctcgcattcgatgtgggcttgggacttaatcttccttccggacttttgggtggtggcttttaatggatattttgtccctcttgatggaaggtttcgccggcgcgctaacgccgatgaacctcctctgggtgattgtcggctgtttgctcggcaccgcggttggcgtcatgcctggtcttggatcctccatggctgtggcgctgctgctgccaatgaccttcgcgcttgatccaactgccgcgttcattatgttctctggcgtatatttcggtggtctcttcggtgactccacgatggcaattttgatgaacaccccaggtcaggcatcggcaatcgcctcaacattcgagggccaccgcatggctcttaacggccgtgcgccacaggctctggctaccgcagcgatcggtgccttcatcggcggtatcgtctcctccttcatcgtggtcttcctcgcaccaaccctggcggaactgtccaccgcattcggccccgccgagtacttcgcactggcactcttcgcgttcgtcgccacctcctccgtggtgtccgactccgtgtttaagggacttgcgtccctcattttcggcctcggcattgcgaccatcggcatcgattcggtcaccggcatcgagcgcttcacgctcggggcaccgcagcttttcgacggaatttccctcgttactgttaccgtcgcgattttggcactgggagaagtgttttacattgcagcccgcgcacgccgtgacaaagcaaatctggagacgcgctctgcaggccgtccgtggcttaccggaacggaattcaaagaagccgctccagcctgggcacgcggaaccatcattggtctgcctttcggtgtgatccctgttggtggatctgaagttccaaccttcttggcttactccaccgagcgcgcattggataaacgacgcaaagatccgcagttcggcgataaaggtgcaatccgaggactcgctgctcctgaagctgcaggtaacgccaccacaggcatggcgatgggcgctcttcttgccctgggtctcccagtctctgcaactgcggccatcatgttggcagcgttccgccagtacggaatccagcccggaccactactcttcgatcgcaaccctgaacttgtctgggcacttcttgccagcttcttcatcgcgatgatcgtcctgctgttcatcaacctgccgttcgcacagctgtgggcaaagctcctgctcattccaaaccactacctctactccggcatcgcattgttctgtggcctgggcatttacgccacctccggcgcagtgttcgacctgctcatgctgctcggcatcggtgtcgtggctttgatcatgcgtcgctacggttacccgctggcaccgctgatgatcggtatggttcttggacctttggctgaaacctccctccgcgacgcactactgtcctcggttggcgatttctccatcctcgtctccagccccatcacctggtctctctacgcagtgctcgccatcttcatcgcggtcagtgtcatcactgcaatccgcggtcgtcgcaagcacctgacttctcagctcgaaaccatcgacgcttaaagtccccgtatagaaacagg

SEQ ID NO: 86 - protein, 510 aa, Corynebacterium glutamicum
MDILSLLMEGFAGALTPMNLLWVIVGCLLGTAVGVMPGLGSSMAVALLLPMTFALDPTAAFIMFSGVYFGGLFGDSTMAILMNTPGQASAIASTFEGHRMALNGRAPQALATAAIGAFIGGIVSSFIVVFLAPTLAELSTAFGPAEYFALALFAFVATSSVVSDSVFKGLASLIFGLGIATIGIDSVTGIERFTLGAPQLFDGISLVTVTVAILALGEVFYIAARARRDKANLETRSAGRPWLTGTEFKEAAPAWARGTIIGLPFGVIPVGGSEVPTFLAYSTERALDKRRKDPQFGDKGAIRGLAAPEAAGNATTGMAMGALLALGLPVSATAAIMLAAFRQYGIQPGPLLFDRNPELVWALLASFFIAMIVLLFINLPFAQLWAKLLLIPNHYLYSGIALFCGLGIYATSGAVFDLLMLLGIGVVALIMRRYGYPLAPLMIGMVLGPLAETSLRDALLSSVGDFSILVSSPITWSLYAVLAIFIAVSVITAIRGRRKHLTSQLETIDA

SEQ ID NO: 87 - DNA, 543 bp, Corynebacterium glutamicum
  CDS (101)..(520): FRXA00080
ttggcagcgttccgccagtacggaatccagcccggaccactactcttcgatcgcaaccctgaacttgtctgggcacttcttgccagcttctttcatcgcgatgatcgtcctgctgttcatcaacctgccgttcgcacagctgtgggcaaagctcctgctcattccaaaccactacctctactccggcatcgcattgttctgtggcctgggcatttacgccacctccggcgcagtgttcgacctgctcatgctgctcggcatcggtgtcgtggctttgatcatgcgtcgctacggttacccgctggcaccgctgatgatcggtatggttcttggacctttggctgaaacctccctccgcgacgcactactgtcctcggttggcgatttctccatcctcgtctccagccccatcacctggtctctctacgcagtgctcgccatcttcatcgcggtcagtgtcatcactgcaatccgcggtcgtcgcaagcacctgacttctcagctcgaaaccatcgacgcttaaagtccccgtatagaaacagg

SEQ ID NO: 88 - protein, 140 aa, Corynebacterium glutamicum
MIVLLFINLPFAQLWAKLLLIPNHYLYSGIALFCGLGIYATSGAVFDLLMLLGIGVVALIMRRYGYPLAPLMIGMVLGPLAETSLRDALLSSVGDFSILVSSPITWSLYAVLAIFIAVSVITAIRGRRKHLTSQLETIDA

SEQ ID NO: 89 - DNA, 651 bp, Corynebacterium glutamicum
  CDS (101)..(628): RXN00087
tcgtcagtcaacaaacgttttcccacccggaggtctccccgtgtctaccgaaatccacaacgccccacccaaggccccaacttggcttggctgggtgctcatgatcggcggaataatcggcctcattttgtcggtgatcatcatggccgaaaaacttgccatcctcgaggatcccggtcacatcaccagctgcgatttcaatgcagtcctagcttgtggcgatgtcatgcgttccggccaagctaacgcgttcggcatcccgaatccgctcatcggcatcgccggtttcgccgctgtcgccatcatcggcgccggcatcctcgcgggcggcgggttccgcggttggttctggttcggcgcccaggccggactcacttttgccatgatgttctgccactggctcgcctaccaatccatgtccgtcatccgcgcgctctgcccttactgcatgggcgtgtggaccgtatcgatcatcatgttcgtgctggtcactgcatggaatgtgaaaactttcagcggctccgacagcacgttcgtcaacgcactgtacaaatacaagtgggtcatcgcgatcgtctggctgctgctcatcgcagccgcagctgtgtggtcattccgctacatgttctaggcatttaaggctttcaggcc

SEQ ID NO: 90 - protein, 176 aa, Corynebacterium glutamicum
MIGGIIGLILSVIIMAEKLAILEDPGHITSCDFNAVLACGDVMRSGQANAFGIPNPLIGIAGFAAVAIIGAGILAGGGFRGWFWFGAQAGLTFAMMFCHWLAYQSMSVIRALCPYCMGVWTVSIIMFVLVTAWNVKTFSGSDSTFVNALYKYKWVIAIVWLLLIAAAAVWSFRYMF

SEQ ID NO: 91 - DNA, 651 bp, Corynebacterium glutamicum; identical to SEQ ID NO: 89
  CDS (101)..(628): FRXA00087

SEQ ID NO: 92 - protein, 176 aa, Corynebacterium glutamicum; identical to SEQ ID NO: 90

SEQ ID NO: 93 - DNA, 426 bp, Corynebacterium glutamicum
  CDS (101)..(403): RXN00096
ggggaacctggggtaaaaggagaagtattcattaccccaataacctactaggtggggtggacacgcatagtcgacagccagacgtggcagaatagtgtgcatgactaatgcaggtgacaacttcgagatcaggatgccttctggcacggatgacccattgtccgatgcggagatccaaaagtatcgcgaggagatcaaccgcttggaccgcgaaatcctcgatgcggtgaaacgccgcacgaagatttcccaaaccatcggaaaaacacgcatgagctcgggcggaacacgtctcgtgcacacccgagaagtagcaatcatcaaccaattccgtgaagagatcggcgaggaaggccctgccctcgctggaattttgctgcgcatgggacgcggaaaactcggataagttatccacaggtagaaaaa

SEQ ID NO: 94 - protein, 101 aa, Corynebacterium glutamicum
MTNAGDNFEIRMPSGTDDPLSDAEIQKYREEINRLDREILDAVKRRTKISQTIGKTRMSSGGTRLVHTREVAIINQFREEIGEEGPALAGILLRMGRGKLG

SEQ ID NO: 95 - DNA, 426 bp, Corynebacterium glutamicum
  CDS (101)..(403): FRXA00096
ggggaacctggggtaaaaggagaagtattcattaccccaataacctactaggtggggtggacacgcatagtcgacagccagacgtggcagaatagtgtgcatgactaatgcaggtgacaacttcgagatcaggatgccttctggcacggatgacccattgtccgatgcggagatccaaaagtatcgcgaggagatcaaccgcttggaccgcgaaatcctcgatgcggtgaaacgccgcacgaagatttcccaaaccatcggaaaaacacgcatgagctcgggcggaacacgtctcgtgcacacccgagaagtagcaatcatcaaccagttccgtgaagagatcggcgaggaaggccctgccctcgctggaattttgctgcgcatgggacgcggaaaactcggataagttatccacaggtagaaaaa

SEQ ID NO: 96 - protein, 101 aa, Corynebacterium glutamicum; identical to SEQ ID NO: 94

SEQ ID NO: 97 - DNA, 1299 bp, Corynebacterium glutamicum
  CDS (101)..(1276): RXN00097
tcagggttttagccgttgatgggcagagttatccacaggtttttagcgagctggtttccgacgaagaaaatagtggataggttacagggcagaatcccgaatggaggtgccttccttgtttaccaacttcttcgcagtcaacaacccagacagtccgcccgcacgacaaaaaaccaaactcagagaactggaacaccgcttctggcaagaacacctgccaggcgacgacgatgaccattccaccgcaatctccagcctcgccatcgtcacaggtctaacaaaagcgcaggtctcccgcatatccatcgcgtttgccacgctcgccgacttgcccgaactcaaagccctgcaacaaaagctgtaccacctcgacctctcccgactgatcaccattagcaacgaactcgccggcatcaaccccgacaacctcgccggcgccgacgcaatcctcaccgaatacctcaccgccaccagccccaaccagattctgccaagcccggcgtccataggacgcaagataaaagaaataagagatttgcttgacgacgcaagagccaccggttcgcgcggtacccaagacgacagctctttcggagtgaccttctccccagacggaaccgccgaaatcggagcctccgtcgatgctgtggacgggcacatcatcaacgacgccgtcacccaacacgcgaagaaaaacgacctcacctacggcgaagctttcagcgacatccttcggaacaatatccaagtcaaggtagtcctcaacttgtacaccgccaaagacctcgccaacgccccagtgtgggccagcggaatcggctggttggatgccaagactggaacattctggtcagagaaagccaacaaagaacaagacatggatgcggctgccaaaatcagcaccgacaaacacgatcctccaccagcgttgcgtgacgcactcattggtcgtgatggcacctgccgattccctggctgttcagtcccagcgctcaaaacccaagccgaccaccgcatcccctacgaagaaggcggagaaacttgcctaggcggaatcggctgcctctgtcaacaccaccacaacatgaaaaccgacggccgagtcacctaccttctcgatcccttctccggcatcatcgtctggctcatgggagacggaacatgggcagtgtcagaacccaacgggccgctcaatcccaaaaatgcgagatgggcgcaaacagtcgcccaacaccgggcacgccaccacaagcgttgggttaaggaggacgccaagtagccggatggccacgtcgaaaa

SEQ ID NO: 98 - protein, 392 aa, Corynebacterium glutamicum
MEVPSLFTNFFAVNNPDSPPARQKTKLRELEHRFWQEHLPGDDDDHSTAISSLAIVTGLTKAQVSRISIAFATLADLPELKALQQKLYHLDLSRLITISNELAGINPDNLAGADAILTEYLTATSPNQILPSPASIGRKIKEIRDLLDDARATGSRGTQDDSSFGVTFSPDGTAEIGASVDAVDGHIINDAVTQHAKKNDLTYGEAFSDILRNNIQVKVVLNLYTAKDLANAPVWASGIGWLDAKTGTFWSEKANKEQDMDAAAKISTDKHDPPPALRDALIGRDGTCRFPGCSVPALKTQADHRIPYEEGGETCLGGIGCLCQHHHNMKTDGRVTYLLDPFSGIIVWLMGDGTWAVSEPNGPLNPKNARWAQTVAQHRARHHKRWVKEDAK

SEQ ID NO: 99 - DNA, 1284 bp, Corynebacterium glutamicum
  CDS (101)..(1261): FRXA00097
ttgatgggcagagttatccacaggtttttagcgagctggtttccgacgaagaaaatagtggataggttacagggcagaatcccgaatggaggtgccttccttgtttaccaacttcttcgcagtcaacaacccagacagtccgcccgcacgacaaaaaaccaaactcagagaactggaacaccgcttctggcaagaacacctgccaggcgacgacgatgaccattccaccgcaatctccagcctcgccatcgtcacaggtctaacaaaagcgcaggtctcccgcatatccatcgcgtttgccacgctcgccgacttgcccgaactcaaagccctgcaacaaaagctgtaccacctcgacctctcccgactgatcaccattagcaacgaactcgccggcatcaaccccgacaacctcgccggcgccgacgcaatcctcaccgaatacctcaccgccaccagccccaaccagattctgccaagcccggcgtccataggacgcaagataaaagaaataagagatttgcttgacgacgcaagagccaccggttcgcgcggtacccaagacgacagctctttcggagtgaccttctccccagacggaaccgccgaaatcggagcctccgtcgatgctgtggacgggcacatcatcaacgacgccgtcacccaacacgcgaagaaaaacgacctcacctacggcgaagctttcagcgacatccttcggaacaatatccaagtcaaggtagtcctcaacttgtacaccgccaaagacctcgccaacgccccagtgtgggccagcggaatcggctggttggatgccaagactggaacattctggtcagagaaagccaacaaagaacaagacatggatgcggctgccaaaatcagcaccgacaaacacgatcctccaccagcgttgcgtgacgcactcattggtcgtgatggcacctgccgattccctggctgttcagtcccagcgctcaaaacccaagccgaccaccgcatcccctacgaagaaggcggagaaacttgcctaggcggaatcggctgcctctgtcaacaccaccacaacatgaaaaccgacggccgagtcacctaccttctcgatcccttctccggcatcatcgtctggctcatgggagacggaacatgggcagtgtcagaacccaacgggccgctcaatcccaaaaatgcgagatgggcgcaaacagtcgcccaacaccgggcacgccaccacaagcgttgggttaaggaggacgccaagtagccggatggccacgtcgaaaa

SEQ ID NO: 100 - protein, 387 aa, Corynebacterium glutamicum
LFTNFFAVNNPDSPPARQKTKLRELEHRFWQEHLPGDDDDHSTAISSLAIVTGLTKAQVSRISIAFATLADLPELKALQQKLYHLDLSRLITISNELAGINPDNLAGADAILTEYLTATSPNQILPSPASIGRKIKEIRDLLDDARATGSRGTQDDSSFGVTFSPDGTAEIGASVDAVDGHIINDAVTQHAKKNDLTYGEAFSDILRNNIQVKVVLNLYTAKDLANAPVWASGIGWLDAKTGTFWSEKANKEQDMDAAAKISTDKHDPPPALRDALIGRDGTCRFPGCSVPALKTQADHRIPYEEGGETCLGGIGCLCQHHHNMKTDGRVTYLLDPFSGIIVWLMGDGTWAVSEPNGPLNPKNARWAQTVAQHRARHHKRWVKEDAK

SEQ ID NO: 101 - DNA, 612 bp, Corynebacterium glutamicum
  CDS (101)..(589): RXN00114
tgcattccctaacgggaatgcagctttttgtgttcctagtgcaaatcgaaatctcatgtgatttacttaaaacctaattaaatctactatcggagatctcatgaaacttctcaagtttgctgcagcaggaaccttcgcactagccctggctggctgcacacagactgagtctctcgtagcaacaatcgaatctgcaacctctgcagcacaggcatccggaaacgacgtagaaggagaccaaacctccgcgttcgaactctccgttggcgaatgcttcaacgacacctacgaagaagaaatctccgaagtacccatcgtcgactgcgcagaacctcacgacaacgagatctactacctctacgacatcgaaggcgacgacttcccaaccgacatcaccaccacaggctacgaaggctgcctcccaacatttgaaggcttcgtaggagctccttacgaaacctccatctacgaggtctacccaatgaccccaacctttggctcctggacaaacggcgaccgcgaggtagtgtgctccgtgtacttggccaccggtgagcagatgaccggaaccgcagcaggaaccgcgcagtagattttggatagggaattttg

SEQ ID NO: 102 - protein, 163 aa, Corynebacterium glutamicum
MKLLKFAAAGTFALALAGCTQTESLVATIESATSAAQASGNDVEGDQTSAFELSVGECFNDTYEEEISEVPIVDCAEPHDNEIYYLYDIEGDDFPTDITTTGYEGCLPTFEGFVGAPYETSIYEVYPMTPTFGSWTNGDREVVCSVYLATGEQMTGTAAGTAQ

SEQ ID NO: 103 - DNA, 612 bp, Corynebacterium glutamicum; identical to SEQ ID NO: 101
  CDS (101)..(589): FRXA00114

SEQ ID NO: 104 - protein, 163 aa, Corynebacterium glutamicum; identical to SEQ ID NO: 102

SEQ ID NO: 105 - DNA, 963 bp, Corynebacterium glutamicum
  CDS (101)..(940): RXN00120
acaaactcttaatttaatgagacgtaagtagttgatagttaggggaaatactcccaaatcctcacaggaaacgctctgaattctttcaaaaaaatgtttcatgcttattggcatgagcaatcaaacagtcaatcaagcagtgtcgtcaggggtgaaagcatccccgcacaggttcaatcgttttgaaatcaaatacttgattacagagcaagatgtacctgcactccgcgagcagttggcaacgaggatgagcacggatccgctttccccacccggaggctaccgagtggaatccctttacttcgattcagccgatttacggtgctacaccgaaaagatcgagggtctgaaattccgaaggaaactacggatccgtacctacggtgatggagtgctcactccagaatccaccgtgtcggtagagatcaagcagcgggttaacaaagtaactcaaaagcgtcggctggatttgccctttatatatgcgctcgccctgggcgatagcacgggcgccgcggtaggcgagcaggtggacgtcgagaagcttcttgaaatctctccggaaaaccagcacgctttgattcacgaaatggcgtcgtttgctaaaaattatcggctgcgacccatcgccaccacgaagtatcaccgcgaggcattcgtcggcgctgatgcggaggaaagttcgcgagtcaccattgaccacggtgtttcaggccgtgatcgtgattttctgcttggccaagaccttgaagaccgcccaacggtggcgcaaggattggcagtcgtggaaatcaaatgcgatgaacgcgtgccgttttggctcactgatatgactgctcaactggaaatgtccgtgattcggatgtccaaatactgcgaaaccatcgaagcgtttcacaaccgtccggcatcagctttcggcgctgtcgaccccatcttctaaacaagaaaggcccctccaat

SEQ ID NO: 106 - protein, 280 aa, Corynebacterium glutamicum
MLIGMSNQTVNQAVSSGVKASPHRFNRFEIKYLITEQDVPALREQLATRMSTDPLSPPGGYRVESLYFDSADLRCYTEKIEGLKFRRKLRIRTYGDGVLTPESTVSVEIKQRVNKVTQKRRLDLPFIYALALGDSTGAAVGEQVDVEKLLEISPENQHALIHEMASFAKNYRLRPIATTKYHREAFVGADAEESSRVTIDHGVSGRDRDFLLGQDLEDRPTVAQGLAVVEIKCDERVPFWLTDMTAQLEMSVIRMSKYCETIEAFHNRPASAFGAVDPIF

SEQ ID NO: 107 - DNA, 777 bp, Corynebacterium glutamicum
  CDS (101)..(754): FRXA00120
aatcaaatacttgattacagagcaagatgtacctgcactccgcgagcagttggcaacgaggatgagcacggatccgctttccccacccggaggctaccgagtggaatccctttacttcgattcagccgatttacggtgctacaccgaaaagatcgagggtctgaaattccgaaggaaactacggatccgtacctacggtgatggagtgctcactccagaatccaccgtgtcggtagagatcaagcagcgggttaacaaagtaactcaaaagcgtcggctggatttgccctttatatatgcgctcgccctgggcgatagcacgggcgccgcggtaggcgagcaggtggacgtcgagaagcttcttgaaatctctccggaaaaccagcacgctttgattcacgaaatggcgtcgtttgctaaaaattatcggctgcgacccatcgccaccacgaagtatcaccgcgaggcattcgtcggcgctgatgcggaggaaagttcgcgagtcaccattgaccacggtgtttcaggccgtgatcgtgattttctgcttggccaagaccttgaagaccgcccaacggtggcgcaaggattggcagtcgtggaaatcaaatgcgatgaacgcgtgccgttttggctcactgatatgactgctcaactggaaatgtccgtgattcggatgtccaaatactgcgaaaccatcgaagcgtttcacaaccgtccggcatcagctttcggcgctgtcgaccccatcttctaaacaagaaaggcccctccaat

SEQ ID NO: 108 - protein, 218 aa, Corynebacterium glutamicum
VESLYFDSADLRCYTEKIEGLKFRRKLRIRTYGDGVLTPESTVSVEIKQRVNKVTQKRRLDLPFIYALALGDSTGAAVGEQVDVEKLLEISPENQHALIHEMASFAKNYRLRPIATTKYHREAFVGADAEESSRVTIDHGVSGRDRDFLLGQDLEDRPTVAQGLAVVEIKCDERVPFWLTDMTAQLEMSVIRMSKYCETIEAFHNRPASAFGAVDPIF

SEQ ID NO: 109 - DNA, 1827 bp, Corynebacterium glutamicum
  CDS (101)..(1804): RXN00128
ccattttccgtttggtcttgcctaaagaaccgcatggaaattatcgtgaagcaccgatcccgttgatcgctccagagacaccgtgggaaggggagcagcagtgagtaaaatttcgacgaaactgaaggccctcaccgcggtgctgtctgtgaccactctggtggctgggtgttccacgcttccgcagaacacggatccgcaagtgctgcgctcattttccgggtcccaaagcacacaagagatagcagggccgaccccgaatcaagatccggatttgttgatccgcggcttcttcagcgcaggtgcgtatccgactcagcagtatgaagcggcgaaggcgtatctgacggaagggacgcgcagcacgtggaatccggctgcgtcgactcgtattttggatcgcattgatctgaacactctgccaggttcgacgaatgcggaacgaacgattgcgatccgtggaacgcaggtcggaacgttgctcagcggtggcgtgtatcagccggagaatgcggagtttgaagctgagatcacgatgcgtcgggaagatggggagtggcgtatcgatgctttgccggacgggattttattagagagaaacgatctgcggaaccattacactccgcacgatgtgtatttctttgatccttctggccaggtgttggtgggggatcggcgttggttgttcaatgagtcgcagtcgatgtccacggtgctgatggcccttctggttaatggtccttcgccggcaatttctcctggtgtggtcaatcagctgtccacggatgcgtcgttcgtggggttcaatgatggggagtatcagttcactggtttgggaaatttggatgatgatgcgcgtttgcgtttcgccgcccaggccgtgtggacgttggcgcatgctgatgtcgcaggcccctacactttggtcgctgacggcgcgccgttgctgtcggagttcccaacgctcaccaccgatgacctcgccgaatacaacccagaggcttacaccaacacggtgtccacgttgtttgcgttgcaggatggatcgttgtcgagggtcagttccggcaatgtgagtccactacagggcatttggagcggtggagatatcgattctgcagcgatttcctcctccgccaatgtggtggcagcggtacgccacgaaaacaacgaggcagtgcttactgttggctccatggaaggcgtgacttcagatgcgttgaggagtgaaacgatcactcgtcccacctttgaatacgcgtcgagtgggttgtgggctgtggtggatggggagacgcctgtccgagtcgcacgatcggcaacaaccggtgagctcgtccagacggaggcggagattgtgctgccaagggatgtgacgggtccgatctctgaattccaactgtcacgaactggggtccgggccgccatgatcattgaaggcaaggtgtacgtgggcgtcgtaacgcgtcctggtccgggcgagcggcgcgtgacaaatatcacggaggtggcgccgagcttgggcgaggcggcgctgtcgatcaactggcgcccagacggcattttgcttgtgggcacgtcaattccagagacgccgctgtggcgcgtcgagcaggacggatcggcgatttcgtcgatgccgagcgggaatctcagcgcgccggtggtggcggtggcaagttccgcgacgacggtctacgtcactgattcgcatgcgatgcttcagctgccgactgccgataatgatatttggcgcgaggtgcccggtttgctgggcacgcgtgcggcgccggtggttgcgtactgatggagctgttcttcccgcgc

SEQ ID NO: 110 - protein, 568 aa, Corynebacterium glutamicum
VSKISTKLKALTAVLSVTTLVAGCSTLPQNTDPQVLRSFSGSQSTQEIAGPTPNQDPDLLIRGFFSAGAYPTQQYEAAKAYLTEGTRSTWNPAASTRILDRIDLNTLPGSTNAERTIAIRGTQVGTLLSGGVYQPENAEFEAEITMRREDGEWRIDALPDGILLERNDLRNHYTPHDVYFFDPSGQVLVGDRRWLFNESQSMSTVLMALLVNGPSPAISPGVVNQLSTDASFVGFNDGEYQFTGLGNLDDDARLRFAAQAVWTLAHADVAGPYTLVADGAPLLSEFPTLTTDDLAEYNPEAYTNTVSTLFALQDGSLSRVSSGNVSPLQGIWSGGDIDSAAISSSANVVAAVRHENNEAVLTVGSMEGVTSDALRSETITRPTFEYASSGLWAVVDGETPVRVARSATTGELVQTEAEIVLPRDVTGPISEFQLSRTGVRAAMIIEGKVYVGVVTRPGPGERRVTNITEVAPSLGEAALSINWRPDGILLVGTSIPETPLWRVEQDGSAISSMPSGNLSAPVVAVASSATTVYVTDSHAMLQLPTADNDIWREVPGLLGTRAAPVVAY

SEQ ID NO: 111 - DNA, 1827 bp, Corynebacterium glutamicum; identical to SEQ ID NO: 109
  CDS (101)..(1804): FRXA00128

SEQ ID NO: 112 - protein, 568 aa, Corynebacterium glutamicum; identical to SEQ ID NO: 110

SEQ ID NO: 113 - DNA, 966 bp, Corynebacterium glutamicum
  CDS (101)..(943): RXN00154
tagccagacggcagtattttgaagcggtgaataaacgtttgctcgaatttccatagtgttagggaagtgtagtgcagtgctttgactagggtggtgagctatgagtttttcagacccctatgcaggcaatatttttggtggacactcccgcaacaagcagccggagtatcccgatgtgcccgcaaaaccaggccttgtggtggaagttcgtggagatggcttcgtcggcgctgtgaccggttttgaacgcacctacgatggtgattttgtgcgtctcgaggaccgccgcggacgcgatgcgctgtacaagctgcgcaagggtgcgttcatgattgatgggcagatcgttaacctcacccgtttcgtggaaaaacaagcaccacgtaaatctaattctggttccaggcgtgtagaaaacgcgcaagcaaaggtcgcggcgccgtcacgcatctgggtagaaggcatccatgacgccgccatcgtggagaaagtgtggggacacgaccttcgcgttgagggcgtcgtggtggagtacctggaaggtctagacaacctggaggaacgtctcgcggaatttcagcctgggcctggacgacgcatcggagtgctcgctgatcaccttgttgagggatctaaagaaactcggatgactaaatcactacccgcggatgtcgctgtcaccggccacccctacatcgatatttgggctgctgtgaaaccagagcgtttggggcttaaggcgtggcctgaggtgccatacggggaggattggaaaaccggcatctgcaaacgagttggctggtcagaccccaaagaaggctggcaccgtgtgtataacgccgtgaattccttccgcgatttggactacaccctaattggggcagtggaacgtttggtggattttgtgaccaacctcgatttgagtaaagaggacgtcctcgcctgatttttcgggtgtgtttttgc

SEQ ID NO: 114 - protein, 281 aa, Corynebacterium glutamicum
MSFSDPYAGNIFGGHSRNKQPEYPDVPAKPGLVVEVRGDGFVGAVTGFERTYDGDFVRLEDRRGRDALYKLRKGAFMIDGQIVNLTRFVEKQAPRKSNSGSRRVENAQAKVAAPSRIWVEGIHDAAIVEKVWGHDLRVEGVVVEYLEGLDNLEERLAEFQPGPGRRIGVLADHLVEGSKETRMTKSLPADVAVTGHPYIDIWAAVKPERLGLKAWPEVPYGEDWKTGICKRVGWSDPKEGWHRVYNAVNSFRDLDYTLIGAVERLVDFVTNLDLSKEDVLA

SEQ ID NO: 115 - DNA, 966 bp, Corynebacterium glutamicum; identical to SEQ ID NO: 113
  CDS (101)..(943): FRXA00154

SEQ ID NO: 116 - protein, 281 aa, Corynebacterium glutamicum; identical to SEQ ID NO: 114

SEQ ID NO: 117 - DNA, 477 bp, Corynebacterium glutamicum
  CDS (101)..(454): RXN00162
ggagacgtcgaaaagcataaacctggaacttttccgggcccgcgcccgactgctttgctgaagccctatcccgctattttatttttgaaggaagagttgcgtgtctaccaccaccccaatccaccctgagcgcaagaaacgcgttcgtcaggccctcaccatgttctccatcgctgcgtgggtgactggtgtgtttttgctggcgctggtggcggagatgatcatgaagtacataattggcatggatcttcctgagtgggcacgattcgttccgattgcacatggatgggtttacattgttttcttgatgaccaccctgaacctgggtctgaaggcgcgttggaatccgactcgttgggtgaccaccgctatcgcaggtgtggttccgctgctgtcgttttttgttgagcacaaccgccgcaaggaagttactcagacattccagctgaactcatagttaaatacacaaaaacctcc

SEQ ID NO: 118 - protein, 118 aa, Corynebacterium glutamicum
VSTTTPIHPERKKRVRQALTMFSIAAWVTGVFLLALVAEMIMKYIIGMDLPEWARFVPIAHGWVYIVFLMTTLNLGLKARWNPTRWVTTAIAGVVPLLSFFVEHNRRKEVTQTFQLNS

SEQ ID NO: 119 - DNA, 477 bp, Corynebacterium glutamicum; identical to SEQ ID NO: 117
  CDS (101)..(454): FRXA00162

SEQ ID NO: 120 - protein, 118 aa, Corynebacterium glutamicum; identical to SEQ ID NO: 118

SEQ ID NO: 121 - DNA, 621 bp, Corynebacterium glutamicum
  CDS (101)..(598): RXN00167
ccgacaatccagtggaacttccctatcgctgtgatgcatttttactttcacgttccggtaccctggcaggcagatcttccaatctttaggagccctcgccatgtacctgttgaatccaccagtcactgaacccgagatcctcactgtcaacgagattccgaccgtcgtcgctgtctttgacaaccaccccatgaacgacatgcccgcagcattcgatcaaacctaccaagtgctcttccccaccttgggtgccaagggcatcgcgccaattggccccggatttgctctgtacacctccgaaccaactgacaccgtcagctttgaagtgggcatcccagtcagccaaccacttgagggagatgtttcagccgccagcggcatcgtgctgaaaaactcagtggtccctgccggaaaaattgcgcgaatcagccacatcggctcattcgacggactgagccaagcatggggttcattcgtggaagctcttgaatctgcaggccatgagatcgatatgccgtgttgggaggtatatgtcaccgagccttcccccgacatggatcccgcaacactccaaactgatctatacgtcctgttgaagtagagaagctttctggtcaagtt

SEQ ID NO: 122 - protein, 166 aa, Corynebacterium glutamicum
MYLLNPPVTEPEILTVNEIPTVVAVFDNHPMNDMPAAFDQTYQVLFPTLGAKGIAPIGPGFALYTSEPTDTVSFEVGIPVSQPLEGDVSAASGIVLKNSVVPAGKIARISHIGSFDGLSQAWGSFVEALESAGHEIDMPCWEVYVTEPSPDMDPATLQTDLYVLLK

SEQ ID NO: 123 - DNA, 361 bp, Corynebacterium glutamicum
  CDS (101)..(361): FRXA00167
ccgacaatccagtggaacttccctatcgctgtgatgcatttttactttcacgttccggtaccctggcaggcagatcttccaatctttaggagccctcgccatgtacctgttgaatccaccagtcactgaacccgagatcctcactgtcaacgagattccgaccgtcgtcgctgtctttgacaaccaccccatgaacgacatgcccgcagcattcgatcaaacctaccaagtgctcttccccaccttgggtgccaagggcatcgcgccaattggccccggatttgctctgtacacctccgaaccaactgacaccgtcagctttgaagtgggcatgccagtcagccaaccacttgagggagag

SEQ ID NO: 124 - protein, 87 aa, Corynebacterium glutamicum
MYLLNPPVTEPEILTVNEIPTVVAVFDNHPMNDMPAAFDQTYQVLFPTLGAKGIAPIGPGFALYTSEPTDTVSFEVGMPVSQPLEGE

SEQ ID NO: 125 - DNA, 281 bp, Corynebacterium glutamicum
  CDS (1)..(258): RXN00171
aaagatcagcagaagcagattcataacttggcagctgaggtaaagcgtcttcgtgagcgtgacgatgcacgagatcagcagctaggagtgcttaatgaagccatgttttcactactaggagatggacttgaccgttttcgtgaatctggcgatgaggcatccttcaatgctgcattgaactatcaggcagtggtggcaccagaaatgtttaagaccgtgtatggtgtcgatccgtctaccggagagcctattcccacttaaagtacaacacagtcttttca

SEQ ID NO: 126 - protein, 86 aa, Corynebacterium glutamicum
KDQQKQIHNLAAEVKRLRERDDARDQQLGVLNEAMFSLLGDGLDRFRESGDEASFNAALNYQAVVAPEMFKTVYGVDPSTGEPIPT

SEQ ID NO: 127 - DNA, 354 bp, Corynebacterium glutamicum
  CDS (101)..(331): FRXA00171
cgattaaggtaggggccttaaaaaggggaataaagaatattgggcccagacgaaaactgctggcgagatcatcaaagatcagcagaagcagattcataacttggcagctgaggtaaagcgtcttcgtgagcgtgacgatgcacgagatcagcagctaggagtgcttaatgaagccatgttttcactactaggagatggacttgaccgttttcgtgaatctggcgatgaggcatccttcaatgctgcattgaactatcaggcagtggtggcaccagaaatgtttaagaccgtgtatggtgtcgatccgtctaccggagagcctattcccacttaaagtacaacacagtcttttca

SEQ ID NO: 128 - protein, 77 aa, Corynebacterium glutamicum
LAAEVKRLRERDDARDQQLGVLNEAMFSLLGDGLDRFRESGDEASFNAALNYQAVVAPEMFKTVYGVDPSTGEPIPT

SEQ ID NO: 129 - DNA, 564 bp, Corynebacterium glutamicum
  CDS (101)..(541): RXN00194
aaatatgagaacatagtgagagttaaaccaagttctgtaggtgcttgttgcagcgggcgcgaaggcgtaccactgcaacttgcgaataaaggagtaaaacgtggctggttcctcccacacgattgagcctgagatctaccgcggtgtatccacccttgatgagccttcggctgcatggggatggcacggtctcaagcgcaacaccatccaactcgctggctggatttccgttctgttcatgcttggatacaacttcggtaaccacaagggccacgttgaaaccatctggcttctcgtcatcaccgcccttctggtcatcggcctgctgatccacctgttcgagccaaagctcttccaggttcgcaccatcacttcccgcaacaagcctgtcggccacgtcgagccagactggacctacgaccaggcaaccctcaccggcacctggggtaacctcactgactcccagcttcgctccgtcaacatcgagccaagccgtgtcgctcacctgcgtgctgcagattctgcgaaagaactagacaactagttttttaaaaagaaaatgcg

SEQ ID NO: 130 - protein, 147 aa, Corynebacterium glutamicum
VAGSSHTIEPEIYRGVSTLDEPSAAWGWHGLKRNTIQLAGWISVLFMLGYNFGNHKGHVETIWLLVITALLVIGLLIHLFEPKLFQVRTITSRNKPVGHVEPDWTYDQATLTGTWGNLTDSQLRSVNIEPSRVAHLRAADSAKELDN

SEQ ID NO: 131 - DNA, 385 bp, Corynebacterium glutamicum
  CDS (101)..(385): FRXA00194
aaatatgagaacatagtgagagttaaaccaagttctgtaggtgcttgttgcagcgggcgcgaaggcgtaccactgcaacttgcgaataaaggagtaaaacgtggctggttcctcccacacgattgagcctgagatctaccgcggtgtatccacccttgatgagccttcggctgcatggggatggcacggtctcaagcgcaacaccatccaactcgctggctggatttccgttctgttcatgcttggatacaacttcggtaaccacaagggccacgttgaaaccatctggcttctcgtcatcaccgcccttctggtcatcggcctgctgatccacctgttcgagccaaaagctcttccaggttcgcaccatcacttctcgcaacaa

SEQ ID NO: 132 - protein, 95 aa, Corynebacterium glutamicum
VAGSSHTIEPEIYRGVSTLDEPSAAWGWHGLKRNTIQLAGWISVLFMLGYNFGNHKGHVETIWLLVITALLVIGLLIHLFEPKALPGSHHHFSQQ

SEQ ID NO: 133 - DNA, 1335 bp, Corynebacterium glutamicum
  CDS (101)..(1312): RXN00197
gtcgatgatattttggcaaccgaatctgaggcacgcgcgcgtgcgaatgctttgatcaaccggttggcaaccaacttgtaagctaaggagcttccgcctcgtggcagcctatcttcttggtgtcgtattatttttcctcggcatcgcagtaaccatcgcgcttcacgagtgggggcacttcatcacagcgcgcattttcggaatgaaagtgcggcgtttcttcatcggtttcggcccgacggtgtttgccaaaagacgcggcgaaaccgtgtacggccttaaagcgattccggtcggcggtttttgtgacatcgcggggatgactgcccaagatgaacttgatccggaagacctgccgcgcgccatgtatctaaagccctggtggcagcgcataattgtgctttccggcggcgtgatcatgaatctgatcgtcggctttttggtgctttacggcgtggcggtgagctccggaatcccgaatccggatgtggataccaccgcgacagtcgacaccgttcagtgcgtgccggaaacccaaatttccgcaactgaactgtcctcctgcgtaggttcaggcccagcgggcgacgccggcattgagcacggcgataagattttggccgtcaacggccaagagatggcaagcttcaccgccatccgcgatgcgatcctcgagctcccaggcgaaacggcaacgctgacgattgaacgggagggaacgcttttcgacgtcgacctccaggttgcctctgtcacccgtctcgcctctgacggttcagaaattaccgtcggcgcggtgggcatgtcgagccttccaccgaccgatgtgtacaaaaaatacggcccaatcgagggtgtgggagcaactgcacgtttcaccggcgacatgatcagcgccacgtgggatggcctcaaagccttcccggcgaaaatcccaggggtcgtcgcatccatcttcggtgcagaacgagatgtagaaagccccatgagtgtggtgggcgccgtacgcatcggcggcgaatttgtcgaacgttccatgtgggacatgttcatgatgatgctggccagcctgaacttcttcctcgcgctgtttaacctcgtgccgctgccaccacttgatggcggacacattgccgtggtgatctatgaaaaaatccgcgacttcttccgcaaactgcgcggaaaaccagcgggcggcccagcggattacaccaaactaatgcccgtcaccgtagctgtcgcagccttgctgatgacagtgggaggcctggtcattgtcgccgatgtggtcaatcccatccgactctttggctaacgatacggaattgaactgcc

SEQ ID NO: 134 - protein, 404 aa, Corynebacterium glutamicum
VAAYLLGVVLFFLGIAVTIALHEWGHFITARIFGMKVRRFFIGFGPTVFAKRRGETVYGLKAIPVGGFCDIAGMTAQDELDPEDLPRAMYLKPWWQRIIVLSGGVIMNLIVGFLVLYGVAVSSGIPNPDVDTTATVDTVQCVPETQISATELSSCVGSGPAGDAGIEHGDKILAVNGQEMASFTAIRDAILELPGETATLTIEREGTLFDVDLQVASVTRLASDGSEITVGAVGMSSLPPTDVYKKYGPIEGVGATARFTGDMISATWDGLKAFPAKIPGVVASIFGAERDVESPMSVVGAVRIGGEFVERSMWDMFMMMLASLNFFLALFNLVPLPPLDGGHIAVVIYEKIRDFFRKLRGKPAGGPADYTKLMPVTVAVAALLMTVGGLVIVADVVNPIRLFG

SEQ ID NO: 135 - DNA, 1111 bp, Corynebacterium glutamicum
  CDS (101)..(1111): FRXA00197
gtcgatgatattttggcaaccgaatctgaggcacgcgcgcgtgcgaatgctttgatcaaccggttggcaaccaacttgtaagctaaggagcttccgcctcgtggcagcctatcttcttggtgtcgtattatttttcctcggcatcgcagtaaccatcgcgcttcacgagtgggggcacttcatcacagcgcgcattttcggaatgaaagtgcggcgtttcttcatcggtttcggcccgacggtgtttgccaaaagacgcggcgaaaccgtgtacggccttaaagcgattccggtcggcggtttttgtgacatcgcggggatgactgcccaagatgaacttgatccggaagacctgccgcgcgccatgtatctaaagccctggtggcagcgcataattgtgctttccggcggcgtgatcatgaatctgatcgtcggctttttggtgctttacggcgtggcggtgagctccggaatcccgaatccggatgtggataccaccgcgacagtcgacaccgttcagtgcgtgccggaaacccaaatttccgcaactgaactgtcctcctgcgtaggttcaggcccagcgggcgacgccggcattgagcacggcgataagattttggccgtcaacggccaagagatggcaagcttcaccgccatccgcgatgcgatcctcgagctcccaggcgaaacggcaacgctgacgattgaacgggagggaacgcttttcgacgtcgacctccaggttgcctctgtcacccgtctcgcctctgacggttcagaaattaccgtcggcgcggtgggcatgtcgagccttccaccgaccgatgtgtacaaaaaatacggcccaatcgagggtgtgggagcaactgcacgtttcaccggcgacatgatcagcgccacgtgggatggcctcaaagccttcccggcgaaaatcccaggggtcgtcgcatccatcttcggtgcagaacgagatgtagaaagccccatgagtgtggtgggcgcgtcacgcatcggcggcgaatttgtcgaacgttccatgtgggacatgttcatgatgatgctggccagcctgaacttcttcctcgcgctgtttaacctcgtgccgctgcca

SEQ ID NO: 136 - protein, 337 aa, Corynebacterium glutamicum
VAAYLLGVVLFFLGIAVTIALHEWGHFITARIFGMKVRRFFIGFGPTVFAKRRGETVYGLKAIPVGGFCDIAGMTAQDELDPEDLPRAMYLKPWWQRIIVLSGGVIMNLIVGFLVLYGVAVSSGIPNPDVDTTATVDTVQCVPETQISATELSSCVGSGPAGDAGIEHGDKILAVNGQEMASFTAIRDAILELPGETATLTIEREGTLFDVDLQVASVTRLASDGSEITVGAVGMSSLPPTDVYKKYGPIEGVGATARFTGDMISATWDGLKAFPAKIPGVVASIFGAERDVESPMSVVGASRIGGEFVERSMWDMFMMMLASLNFFLALFNLVPLP

SEQ ID NO: 137 - DNA, 1113 bp, Corynebacterium glutamicum
  CDS (101)..(1090): RXN00216
gtgttgctcgcggccaggcagcagtgctgtacctgcctgacgcggatggtgacatcgttcttggatcaggcaccatctgccacacggagtcttaagaaaattgggcgcttatggtttaggtgagcttcctggaaaatccgccgcggaagccgccgacattattcagggtgaaacgggcgatcttctccatattcctcagcttccggcgcgaggtttgggtgctgatctgatcggtcgaaccgtcggtctgctggacatgatcaacgttgatcgcggggcccgatcttgggtgatgagcacacgccccagcagattgacgcacctgaccggcgatttccttgacatggatttggatgcgtgcgaggaaacctggggaacgggcgtcgacaagctaaaaatccaagttgctggtccctggactttaggtgcgcgcattgagttggccaatggccatcgcgttttgtctgatcgcggtgcgatgcgtgatctcacgcaggcgctgatcgccggcatcgatgcgcatgcacgcaaggttgctgggcgatttcgcgccgaagtgcaggtgcaaattgatgagccggagctgaaatcgcttatcgacggctccctccctggcacttccacctttgacattattcctgcggtgaatgtcgctgatgccagtgaacgtttgcagcaggtctttagctcgattgaggggccgacatatctcaacctcaccggccagattcctacttgggatgtggctcggggtgcgggcgccgatactgtgcagatttccatggatcaagtccgtggaaatgaacatttggatggttttggtgaaaccatcaccagtggaattcgtcttggtttgggcattacgacaggaaaagatgtcgtagatgaactgctcgagcgaccgcggcaaaaggccgttgaggtagcacgcttttttgatcgtttaggtgtgggccgaaactatctcgtggatgctgttgatattcatccgggtgaggatttggtgcaggggaccatcaccgaggccgcgcaggcttatcgcatggcccgggtgatgtcggagatgttgtcgaaggattcatgcgacctttaaggctttaccggcgctgggtg

SEQ ID NO: 138 - protein, 330 aa, Corynebacterium glutamicum
LGAYGLGELPGKSAAEAADIIQGETGDLLHIPQLPARGLGADLIGRTVGLLDMINVDRGARSWVMSTRPSRLTHLTGDFLDMDLDACEETWGTGVDKLKIQVAGPWTLGARIELANGHRVLSDRGAMRDLTQALIAGIDAHARKVAGRFRAEVQVQIDEPELKSLIDGSLPGTSTFDIIPAVNVADASERLQQVFSSIEGPTYLNLTGQIPTWDVARGAGADTVQISMDQVRGNEHLDGFGETITSGIRLGLGITTGKDVVDELLERPRQKAVEVARFFDRLGVGRNYLVDAVDIHPGEDLVQGTITEAAQAYRMARVMSEMLSKDSCDL

SEQ ID NO: 139 - DNA, 1269 bp, Corynebacterium glutamicum
  CDS (101)..(1246): RXN00222
agggaaaaactaccgtccgcctggacaaagtcatcgatgtactccgcgtccttggactcgagctttctgttggaattcacgatcccctcaaggttaatcaatgacccccactgccgatatctggtttaaagatactttggctgctcatttcacacgcgacggcgaccagaccacattctcctacacagctgattacgcaggtccaccgattgccacgtccctgcccatcaattctgaacccgtgattacgcgctctggagcgatcccaccatttttcgcgggattactccccgaaggtcgtcgcttaagttcactccggagaaacattaaagcctctgccgatgatgaactttcactccttctagcagtgggagctgatcctgttggtgcagtcgctatcttcccccatggtgaaaatacacaacctgcaccacccacagttgattttgacgatgaacttgatttctcggctgcactaaccgagtccgggattgcggatcccgttgcactggccggtgtccaagacaaagcctctgcacgcaccatcgcggtccccgttgcaagcgatgccatcttgaaactctccccgcctgaatacccttacttggtggaaaacgaagcagcttgttaccagttgctgaccaaaaataagcttcgcattgaactgtccaaagtagaagttctccatgacaaacacggcaggtccggactcttagttcaccgctttgaccgcacacccaaaggcaaaatccccgtcgaggatgcaggacaggtcttgggaatctggcctgcagataaatacttagtgagctacgaggacatcgcacaagccctcactaaagtgtgcgcctcccccatcttggcgatgcgcaatctcgccttccaaatcgcagtcgcgtggctcagcggcaatggtgatcttcatgccaagaacatctccattatcaacaaaggccgcggatttgagatcagccccatctatgacatccctgccaccgcagtatatggcgacaccacgatggcattagaaatccagggatccaaaaaggatctcagccaaaagaaattcctaaaattctgtacatccatcggactaccagaaaaaacagccatgtcggttgcgaacgctgcactgttggcaacagaaaatgccgcagagacaattcttgcttcgggaaattttgatacacggatgaatcgagatctggccagggttctcaaacatcgacgaagcgcatggggagcttaattcgcctgtttaagaggtcg

SEQ ID NO: 140 - protein, 382 aa, Corynebacterium glutamicum
MTPTADIWFKDTLAAHFTRDGDQTTFSYTADYAGPPIATSLPINSEPVITRSGAIPPFFAGLLPEGRRLSSLRRNIKASADDELSLLLAVGADPVGAVAIFPHGENTQPAPPTVDFDDELDFSAALTESGIADPVALAGVQDKASARTIAVPVASDAILKLSPPEYPYLVENEAACYQLLTKNKLRIELSKVEVLHDKHGRSGLLVHRFDRTPKGKIPVEDAGQVLGIWPADKYLVSYEDIAQALTKVCASPILAMRNLAFQIAVAWLSGNGDLHAKNISIINKGRGFEISPIYDIPATAVYGDTTMALEIQGSKKDLSQKKFLKFCTSIGLPEKTAMSVANAALLATENAAETILASGNFDTRMNRDLARVLKHRRSAWGA

SEQ ID NO: 141 - DNA, 1269 bp, Corynebacterium glutamicum; identical to SEQ ID NO: 139
  CDS (101)..(1246): FRXA00222

SEQ ID NO: 142 - protein, 382 aa, Corynebacterium glutamicum; identical to SEQ ID NO: 140

SEQ ID NO: 143 - DNA, 633 bp, Corynebacterium glutamicum
  CDS (101)..(610): RXN00232
gctgaaaaaactcccatttggacaatgaacacttgtcaaaatgggagttttggattttcgcaccaccggcagcactcgaaaacgtgtttatacttgaactatgaacgacagggctcaccaacgaataggcgacatcgagcgatcccaagccctcgaccgacttgggtcatattttgcagacggatacctcgacatcgacgaattcgatacccgaaccggcgccgcagcaatcgcacgcacagccggtgaaatagatgtcttgttcacagatcttcccgaacaacaggcaagcaccgccgtgacacccgtgcaagacgataccgagaaagaattagacctggtcctacagcgaggaaagaagctcaagcagatcgactccgccatttgggctgtcgtgatggtctcgttcttcctaggcttgtttgttttcaacgtgccatatttctgggttgtgttcatccttggcggagcggcctccgcgggtgcgcgattcttgctcaaagtagatgacgccgatgaaaaactctttgaggaactccacagcaaggaacaaagcgaacgcgaagcacgcctacgcattgcggcacaacgtcgacgcgagttggaacaatagccacaaaagctatcaagccc

SEQ ID NO: 144 - protein, 170 aa, Corynebacterium glutamicum
MNDRAHQRIGDIERSQALDRLGSYFADGYLDIDEFDTRTGAAAIARTAGEIDVLFTDLPEQQASTAVTPVQDDTEKELDLVLQRGKKLKQIDSAIWAVVMVSFFLGLFVFNVPYFWVVFILGGAASAGARFLLKVDDADEKLFEELHSKEQSEREARLRIAAQRRRELEQ

SEQ ID NO: 145 - DNA, 627 bp, Corynebacterium glutamicum
  CDS (101)..(610): FRXA00232
gctgaaaaaactcccatttggacaatgaacacttgtcaaaatgggagttttggattttcgcaccaccggcagcactcgaaaacgtgtttatacttgaactatgaacgacagggctcaccaacgaataggcgacatcgagcgatcccaagccctcgaccgacttgggtcatattttgcagacggatacctcgacatcgacgaattcgatacccgaaccggcgccgcagcaatcgcacgcacagccggtgaaatagatgtcttgttcacagatcttcccgaacaacaggcaagcaccgccgtgacacccgtgcaagacgataccgagaaagaattagacctggtcctacagcgaggaaagaagctcaagcagatcgactccgccatttgggctgtcgtgatggtctcgttcttcctaggcttgtttgttttcaacgtgccatatttctgggttgtgttcatccttggcggagcggcctccgcgggtgcgcgattcttgctcaaagtagatgacgccgatgaaaaactctttgaggaactccacagcaaggaacaaagcgaacgcgaagcacgcctacgcattgcggcacaacgtcgacgcgagttggaacaatagccacaaaagctatc

SEQ ID NO: 146 - protein, 170 aa, Corynebacterium glutamicum; identical to SEQ ID NO: 144

SEQ ID NO: 147 - DNA, 849 bp, Corynebacterium glutamicum
  CDS (101)..(826): RXN00236
aatgcgagagttctaaaacgagccggtaacatcgacccccatgagttcaggggttagaaaagcaatgggatttggatgcggttcggttttggccgtcatcatggtgatctcatttgttggatgggcgctcagcttcatggatggaacggcacctattcgccaactccagcaaatccctgaagatgttccgccggcgcgtggtgtagaagttccgcaaattgatacagaggcagatggacgcacatccaaccatttgcgtttttgggcggaaccaattgctcaagatactggtgtgtccgctcaagcgattgcggcttatggaaacgcagagctcatcgcgagtactgcgtggcctggctgcaatctggggtggaataccttggcaggtatcggccaggtggaaacccgtcacggtacctacaacggcaaaatgttcgggggcagttccctggatgaaaatggagttgcaacccctccaatcatcggcgttccacttgatggttcaccggggtttgcggaaattcccgacactgatggtggggaattagatggcgatactgaatatgatcgcgcggtaggtcccatgcagttcattccggaaacgtggcgacttatgggattggatgcaaacggtgatggggtagcggaccccaaccaaattgatgacgcagcattgagtgccgcaaacctgttgtgttccaacgatcgtgacttgtccactcctgaaggatggaccgcagctgttcattcttacaacatgtctaatcagtatttgatggacgttcgagatgctgccgcgtcctacgctttacgacagccggcgatctaaaacttaacaagcgcaacccc

SEQ ID NO: 148 - protein, 242 aa, Corynebacterium glutamicum
MVISFVGWALSFMDGTAPIRQLQQIPEDVPPARGVEVPQIDTEADGRTSNHLRFWAEPIAQDTGVSAQAIAAYGNAELIASTAWPGCNLGWNTLAGIGQVETRHGTYNGKMFGGSSLDENGVATPPIIGVPLDGSPGFAEIPDTDGGELDGDTEYDRAVGPMQFIPETWRLMGLDANGDGVADPNQIDDAALSAANLLCSNDRDLSTPEGWTAAVHSYNMSNQYLMDVRDAAASYALRQPAI

SEQ ID NO: 149 - DNA, 849 bp, Corynebacterium glutamicum; identical to SEQ ID NO: 147
  CDS (101)..(826): FRXA00236

SEQ ID NO: 150 - protein, 242 aa, Corynebacterium glutamicum; identical to SEQ ID NO: 148

SEQ ID NO: 151 - DNA, 1401 bp, Corynebacterium glutamicum
  CDS (101)..(1378): RXN00242
ggatcactatcgctttaaacaccgaaaccttcctgctagttcaccaagatttttaagttttaccgcaatttcttgagagctttgggaggataatggcggtgtgaatgaatggcgaacagtctcgcttgtagattccacggcgctgaccgtgatcatcagtgtggccgtgtttacttctgctgtggctctgctcggagttgtgaaaaagcgctctcggtggcgggttctcggagctctcatctcctcagcagttctcaccagtggcgcatgggtggttattgaaaagctgtggaagcctttccccgaccccaatccgtggaccatctatctttccgctggtttggcggtttttcctctgttgagcatcttgttccgcactggtcgtacaagaatactgatggctacactcaccgtgattgcactggttaatacggccgcagtcatcaatgtcatctaccagccatacccgacgttgggttctttcaatcccgtgccaacggctgtgtccatgtcgtatgcagattttgaatctcagaccactgccccgacgatggatgaccgtgaagtcggtgcccttgtgcaggtgccgctagctggaacaacagatgattccacctccggctttgatgcgcgcgatgcctacgcctatattccgcctgcgtattgggataatccttccctacaactgccagttttggttctcatgcccggaaaccccggccagccagatcagtggtttagcagtggaaatgccgatcaaacagcagataatttccaagcaacccacgatggcatcagccccattgtcatcagcgtggatggcacaggatcattcagcggaaaccctgcttgcgtggattctgatgcccaaagcgtgatgacatatctatcccacgatgtccccatgttgatcaaacagaaattccgagtcaatcaggatcagcgcacctggacaattggtggtttaagttacggcggcacctgtgctttgcagatcatgaccaatcaccccgaagcgtatggttctttccttgacttctcgggccaggaagaaccaacacttggcacacgccagcaaactgttgatcagcttttcggcggcgatgaagacgcattcaaagccgttaatccggaagatctgctcaatcaagcaatcagctcaggagcgcatacctacagcgggatttcgggcaggtttattgctggtagcaacgataaaagtgcagtgagcgcgctgtctcatcttgataatttgagcaatcaggcgggcatgtccaccacctttgataccgtggccggtggacattccttccaggtgtggcgcgtggctttagcgaatacttttgattgggttgccaagcgcggcggattgcaggtttaacaatgaaagacgcttcacag

SEQ ID NO: 152 - protein, 426 aa, Corynebacterium glutamicum
VNEWRTVSLVDSTALTVIISVAVFTSAVALLGVVKKRSRWRVLGALISSAVLTSGAWVVIEKLWKPFPDPNPWTIYLSAGLAVFPLLSILFRTGRTRILMATLTVIALVNTAAVINVIYQPYPTLGSFNPVPTAVSMSYADFESQTTAPTMDDREVGALVQVPLAGTTDDSTSGFDARDAYAYIPPAYWDNPSLQLPVLVLMPGNPGQPDQWFSSGNADQTADNFQATHDGISPIVISVDGTGSFSGNPACVDSDAQSVMTYLSHDVPMLIKQKFRVNQDQRTWTIGGLSYGGTCALQIMTNHPEAYGSFLDFSGQEEPTLGTRQQTVDQLFGGDEDAFKAVNPEDLLNQAISSGAHTYSGISGRFIAGSNDKSAVSALSHLDNLSNQAGMSTTFDTVAGGHSFQVWRVALANTFDWVAKRGGLQV

SEQ ID NO: 153 - DNA, 1303 bp, Corynebacterium glutamicum
  CDS (101)..(1303): FRXA00242
ggatcactatcgctttaaacaccgaaaccttcctgctagttcaccaagatttttaagttttaccgcaatttcttgagagctttgggaggataatggcggtgtgaatgaatggcgaacagtctcgcttgtagattccacggcgctgaccgtgatcatcagtgtggccgtgtttacttctgctgtggctctgctcggagttgtgaaaaagcgctctcggtggcgggttctcggagctctcatctcctcagcagttctcaccagtggcgcatgggtggttattgaaaagctgtggaagcctttccccgaccccaatccgtggaccatctatctttccgctggtttggcggtttttcctctgttgagcatcttgttccgcactggtcgtacaagaatactgatggctacactcaccgtgattgcactggttaatacggccgcagtcatcaatgtcatctaccagccatacccgacgttgggttctttcaatcccgtgccaacggctgtgtccatgtcgtatgcagattttgaatctcagaccactgccccgacgatggatgaccgtgaagtcggtgcccttgtgcaggtgccgctagctggaacaacagatgattccacctccggctttgatgcgcgcgatgcctacgcctatattccgcctgcgtattgggataatccttccctacaactgccagttttggttctcatgcccggaaaccccggccagccagatcagtggtttagcagtggaaatgccgatcaaacagcagataatttccaagcaacccacgatggcatcagccccattgtcatcagcgtggatggcacaggatcattcagcggaaaccctgcttgcgtggattctgatgcccaaagcgtgatgacatatctatcccacgatgtccccatgttgatcaaacagaaattccgagtcaatcaggatcagcgcacctggacaattggtggtttaagttacggcggcacctgtgctttgcagatcatgaccaatcaccccgaagcgtatggttctttccttgacttctcgggccaggaagaaccaacacttggcacacgccagcaaactgttgatcagcttttcggcggcgatgaagacgcattcaaagccgttaatccggaagatctgctcaatcaagcaatcagctcaggagcgcatacctacagcgggatttcgggcaggtttattgctggtagcaacgataaaagtgcagtgagcgcgctgtctcatcttgataatttgagcaatcaggcgggcatgtccaccacctttgataccgtggccggtgga

SEQ ID NO: 154 - protein, 401 aa, Corynebacterium glutamicum
VNEWRTVSLVDSTALTVIISVAVFTSAVALLGVVKKRSRWRVLGALISSAVLTSGAWVVIEKLWKPFPDPNPWTIYLSAGLAVFPLLSILFRTGRTRILMATLTVIALVNTAAVINVIYQPYPTLGSFNPVPTAVSMSYADFESQTTAPTMDDREVGALVQVPLAGTTDDSTSGFDARDAYAYIPPAYWDNPSLQLPVLVLMPGNPGQPDQWFSSGNADQTADNFQATHDGISPIVISVDGTGSFSGNPACVDSDAQSVMTYLSHDVPMLIKQKFRVNQDQRTWTIGGLSYGGTCALQIMTNHPEAYGSFLDFSGQEEPTLGTRQQTVDQLFGGDEDAFKAVNPEDLLNQAISSGAHTYSGISGRFIAGSNDKSAVSALSHLDNLSNQAGMSTTFDTVAGG

SEQ ID NO: 155 - DNA, 1050 bp, Corynebacterium glutamicum
  CDS (101)..(1027): RXN00247
aacccctaactactgacctcgcaccacttgttgcagcccgttaccacgctgcattgagcgcactgctggcacatatctaagaccgctaaggaaatcagctatgcagacattaatctttatcgccattgcaggcgtcgcagcacagcttgttgatggcggcctcggcatggggttcggcgtcacctcaaccaccatcctcatcatgctcgcaggtttaggccctgcgcaggcatccgccgtcgtgcacaccgcagaggttggaaccaccttagtttctggtttaagccactggaaatttggcaacgtggattggaaagtagttgtccggctcggtatccccggcgctatcggcgcatttgctggcgctaccttcttgtccaatatttccaccgaagcagcagcaccgatcacctccctgattcttgccctgatcggcatgaacctagtctggcgattcagcaagggacgcatccgccgcgactattccgatcgcccgcacagcaggggattcctcggcggactcggtattgtcggtggtttcgttgacgcatccggtggcggcggatggggtccagtgaccacctctacgctgctgtctttgggacgcaccgaaccccgcaaagtagtcggcaccgtcaacaccgcagaattcttagtctccctagccgcaacattgggcttcgtcgtgggactgtgggatgacctagtagctaacctctctgcagttctcgcgttgctcatcggcggcgcaatcgcagcaccaatcggcgcctggatgatctctcgcgttaatgcaaccgtcctcggtggcttcgtgggcaccctgattgtcacactgaacctgccaaaggtgctcaacgtggttggccttgatttcatccccaccggcctcatccaggtcaccgtcctcctcatcggcctgccgctgacgtacctcggcttccgccgctaccgcaaaaatctcctcaacgagaccatctccagcgaagttgtctccgaaccaaagggccaaaagattaaaagcacttaaaacacgcttttcgacgccca

SEQ ID NO: 156 - protein, 309 aa, Corynebacterium glutamicum
MQTLIFIAIAGVAAQLVDGGLGMGFGVTSTTILIMLAGLGPAQASAVVHTAEVGTTLVSGLSHWKFGNVDWKVVVRLGIPGAIGAFAGATFLSNISTEAAAPITSLILALIGMNLVWRFSKGRIRRDYSDRPHSRGFLGGLGIVGGFVDASGGGGWGPVTTSTLLSLGRTEPRKVVGTVNTAEFLVSLAATLGFVVGLWDDLVANLSAVLALLIGGAIAAPIGAWMISRVNATVLGGFVGTLIVTLNLPKVLNVVGLDFIPTGLIQVTVLLIGLPLTYLGFRRYRKNLLNETISSEVVSEPKGQKIKST

SEQ ID NO: 157 - DNA, 1050 bp, Corynebacterium glutamicum; identical to SEQ ID NO: 155
  CDS (101)..(1027): FRXA00247

SEQ ID NO: 158 - protein, 309 aa, Corynebacterium glutamicum; identical to SEQ ID NO: 156

SEQ ID NO: 159 - DNA, 894 bp, Corynebacterium glutamicum
  CDS (101)..(871): RXN00256
aattaatcaatcagaaaaacatattgaatacttataaatttctgacatactcattaatgagatattcgaagtctttatcaaaatgattaacaaaaggagtatgtttatgtcgctaaaaactcgccgaatattcggcgcacttgctgtttcgctatcaatctctttctcagccattgctacacctgcagcatccgcacaagaactagtggtgagcacatcagcagtaaacgaatttggtgtagttaccagtgacatcacggctgagcaaattcttcaggcgcaagatctaatcgctgagatgaaacagtcagaggacatatatgagtatttcggtgccttgtctgacgttgaacagagatccatcattgcagctgtaaaggaaaatccatatctcattgagaacgaatcaccccgtatgagagtccaaagtgaaacacccgacgaggaaacacctgataagaaaaagccgagcaaaacctacaagctctatatgagcattctcgaaatgatgtcatgtatcaatcttgttgatgttccgtcatgtgcccaagcccttaaagcggcaaatatagctgaacgcgaggccaaggcccgttaccccgattcggtcactaatggtaaaggcgatgcccttcgtcattgtgcatggagcgctctcatgactattcgaatcggaaaagatgcagccgaaagaattggtaacgctcatgaaaccgttgtgagaggtgaacccgaagaaagagaaatggatctcatcaataacgcgctgggtagagacatcggcgaaagattcatcatcaatggcgatgaaacgggtgcgctcagtacttgtgtatccatggctaatatcgggctacttcatactctgttgtaaacaaaggaagtttctatcat

SEQ ID NO: 160 - protein, 257 aa, Corynebacterium glutamicum
MFMSLKTRRIFGALAVSLSISFSAIATPAASAQELVVSTSAVNEFGVVTSDITAEQILQAQDLIAEMKQSEDIYEYFGALSDVEQRSIIAAVKENPYLIENESPRMRVQSETPDEETPDKKKPSKTYKLYMSILEMMSCINLVDVPSCAQALKAANIAEREAKARYPDSVTNGKGDALRHCAWSALMTIRIGKDAAERIGNAHETVVRGEPEEREMDLINNALGRDIGERFIINGDETGALSTCVSMANIGLLHTLL

SEQ ID NO: 161 - DNA, 894 bp, Corynebacterium glutamicum; identical to SEQ ID NO: 159
  CDS (101)..(871): FRXA00256

SEQ ID NO: 162 - protein, 257 aa, Corynebacterium glutamicum; identical to SEQ ID NO: 160

SEQ ID NO: 163 - DNA, 501 bp, Corynebacterium glutamicum
  CDS (101)..(478): RXN00264
aaaccggaagggcccgtttactcccctacttggcgcagaaatccacatcaatccaggtgaagcagtcatctttgatgttgatcccacgtttgaacacggtttgcttgtcgattccggcgacgtccaactagaaggcgtcaccgtcgagcccacccagctggcctacaccggcatcaatgaaacccaactccgaatccgtaacatcggcaccacaccggcgcgtactgtactgctaggtggcgaaccatttaccgaagacatcgtgatgtggtggaacttcattggccgcagccatgaagaaattgccgagtaccgtaaacagtggcaggccgaagctgatcgttttggtatcacccacggatatatcagccaccacaaagatgggctcaccaggcttccagcacccgagcttcccaacgctgctatcaaggcacgtaaaaacccagcaccaactgcacgaccagaaacgagaattgattaaatgcgctccgctcacggccc

SEQ ID NO: 164 - protein, 126 aa, Corynebacterium glutamicum
LLVDSGDVQLEGVTVEPTQLAYTGINETQLRIRNIGTTPARTVLLGGEPFTEDIVMWWNFIGRSHEEIAEYRKQWQAEADRFGITHGYISHHKDGLTRLPAPELPNAAIKARKNPAPTARPETRID

SEQ ID NO: 165 - DNA, 501 bp, Corynebacterium glutamicum
  CDS (101)..(478): FRXA00264
aaaccggaagggccsgtttactcccctacttggcgcagaaatccacatcaatccaggtgaagcagtcatctttgatgttgatcccacgtttgaacacggtttgcttgtcgattccggcgacgtccaactagaaggcgtcaccgtcgagcccacccagctggcctacaccggcatcaatgaaacccaactccgaatccgtaacatcggcaccacaccggcgcgtactgtactgctaggtggcgaaccatttaccgaagacatcgtgatgtggtggaacttcattggccgcagccatgaagaaattgccgagtaccgtaaacagtggcaggccgaagctgatcgttttggtatcacccacggatatatcagccaccacaaagatgggctcaccaggcttccagcacccgagcttcccaacgctgctatcaaggcacgtaaaaacccagcaccaactgcacgaccagaaacgagaattgattaaatgcgctccgctcacggccc

SEQ ID NO: 166 - protein, 126 aa, Corynebacterium glutamicum; identical to SEQ ID NO: 164

SEQ ID NO: 167 - DNA, 441 bp, Corynebacterium glutamicum
  CDS (101)..(418): RXN00267
gtcgtacttatcttttaaagtcatgccttaaaggatacggagatcactccggcttggcttgggtggcggtgttatcaaagtagtcgtagcgttgagaactatgcgaaactctaagtctggcctggccttttccgcagctgcactattttgtgtcgtcgcggtaatcactcgtattgcaagttccccatcatttatcgctattgtggcgatcatcgtggctgcgatcgcactttttgtgggtctgaacagtcgtgtgggaacaaagcttgttgatcagccagtggtgttcacccaggaacaaattgatcaattgaaagagttgaaatcccgcgaccaggaggcggcagcgatccgtcaggcgcagctgtggagtaggggatcgtccagcgaagcggtcgcagaggctgtgaggaagctctaagtcgacttaagtgcgcgaag

SEQ ID NO: 168 - protein, 106 aa, Corynebacterium glutamicum
MRNSKSGLAFSAAALFCVVAVITRIASSPSFIAIVAIIVAAIALFVGLNSRVGTKLVDQPVVFTQEQIDQLKELKSRDQEAAAIRQAQLWSRGSSSEAVAEAVRKL

SEQ ID NO: 169 - DNA, 358 bp, Corynebacterium glutamicum
  CDS (66)..(335): FRXA00267
cgtagcgttgagaactatgcgaaactctaagtctggcctggccttttccgcagctgcactattttgtgtctgtcgcggtaatcactcgtattgcaagttccccatcatttatcgctattgtggcgatcatcgtggctgcgatcgcactttttgtgggtctgaacagtcgtgtgggaacaaagcttgttgatcagccagtggtgttcacccaggaacaaattgatcaattgaaagagttgaaatcccgcgaccaggaggcggcagcgatccgtcaggcgcagctgtggagtaggggatcgtccagcgaagcggtcgcagaggctgtgaggaagctctaagtcgacttaagtgcgcgaag

SEQ ID NO: 170 - protein, 90 aa, Corynebacterium glutamicum
VSVAVITRIASSPSFIAIVAIIVAAIALFVGLNSRVGTKLVDQPVVFTQEQIDQLKELKSRDQEAAAIRQAQLWSRGSSSEAVAEAVRKL

SEQ ID NO: 171 - DNA, 1113 bp, Corynebacterium glutamicum
  CDS (101)..(1090): RXN00271
tagtttaaatcatgagacatttcacatatggttctttatccgagacatgtgttgacgctgtctgcccctttttgaaaataacactttaaggagatgtgccatgttttcttcccgttcgaaggtactcgcaagcatctttactgttggcgccttggcgttggcttcgtgctcaagcgattccagtgacagctccacctccactgatgctgcaggtggcgactcttaccgagttggcatcaaccagcttgttcagcaccctgcacttgatgcagcgaccactggtttcaaggaagcttttgaagaggcaggcgttgacgtcacctttgatgagcaaaacgctaacggcgagcagggcactgcactgactatttctcagcagttcgcttctgacaatttggatctcgtgttggctgttgcaactccagcagcacaggcaactgcgcagaatatcactgatatcccagtcctgttcaccgcagttaccgatgcagtgtcggcagagctggtggattctaatgaagcacctggcggaaacgtcaccggtacttctgatatcgcaccgattgagcagcagttggagcttttgcagcagctggttcctgacgcaaagtccatcggcatcgtctacgcgtctggtgaggtcaactctcaggtgcaggtcgatgaggtcaccaaggctgctgagccactggggctgtccgttaatactcagactgtcactaccgtgaacgagattcagcaggctgttgaagctctcggcgatgttgatgtcatctacgttccaactgacaacatggttgtttccggtatttcttctctggttcaggttgctgagcagaagcagatccctgtgatcggcgctgagtccggcactgttgagggtggcgcactggcaaccctgggtatcgattacaccgagcttggccgccagactggtgagatggctctgcgtattctgcaggacggcgaagacccagcaaccatgcctgtggagactgcaactgagttcacctacgtgatcaacgaagatgcagcagagcgccagggcgtggagatccctcaagagattttggataaggccgaacgcgtatgatcggcgcttttgagttcgga

SEQ ID NO: 172 - protein, 330 aa, Corynebacterium glutamicum
MFSSRSKVLASIFTVGALALASCSSDSSDSSTSTDAAGGDSYRVGINQLVQHPALDAATTGFKEAFEEAGVDVTFDEQNANGEQGTALTISQQFASDNLDLVLAVATPAAQATAQNITDIPVLFTAVTDAVSAELVDSNEAPGGNVTGTSDIAPIEQQLELLQQLVPDAKSIGIVYASGEVNSQVQVDEVTKAAEPLGLSVNTQTVTTVNEIQQAVEALGDVDVIYVPTDNMVVSGISSLVQVAEQKQIPVIGAESGTVEGGALATLGIDYTELGRQTGEMALRILQDGEDPATMPVETATEFTYVINEDAAERQGVEIPQEILDKAERV

SEQ ID NO: 173 - DNA, 1113 bp, Corynebacterium glutamicum; identical to SEQ ID NO: 171
  CDS (101)..(1090): FRXA00271

SEQ ID NO: 174 - protein, 330 aa, Corynebacterium glutamicum; identical to SEQ ID NO: 172

SEQ ID NO: 175 - DNA, 495 bp, Corynebacterium glutamicum
  CDS (101)..(472): RXN00272
accgatgcaccagccaccaacgcgtccaaatcaatatcagcctggcccacaaggtggaattccagtgggtggccatctgccacaaccaggtgcagggcacatgccggaaccagaaacctccacgatgggctccatccaaaagtccggtgaatggctcgttcctgcatattcggcatacaagctcaacggtgctgaccttttcttagatatccgccatgccaccgcggctgctcctgtcattacctttgatgtcaacatgaccatgggttctatgacgctgattgttccaccgggtgtgtatgtggaagtgcagatggcttccaagaactggtcggatttcaaggttcaaacaaccaatcctctccccggtgctccccgagtgttcatcactggtgttgcacgcgcatcagggttgaaggttttcaccaagcatcctcatgagccttttgggttctggcagaaaatgtttgagtagcctcgggccacgcccgaacc

SEQ ID NO: 176 - protein, 124 aa, Corynebacterium glutamicum
MPEPETSTMGSIQKSGEWLVPAYSAYKLNGADLFLDIRHATAAAPVITFDVNMTMGSMTLIVPPGVYVEVQMASKNWSDFKVQTTNPLPGAPRVFITGVARASGLKVFTKHPHEPFGFWQKMFE

SEQ ID NO: 177 - DNA, 495 bp, Corynebacterium glutamicum; identical to SEQ ID NO: 175
  CDS (101)..(472): FRXA00272

SEQ ID NO: 178 - protein, 124 aa, Corynebacterium glutamicum; identical to SEQ ID NO: 176

SEQ ID NO: 179 - DNA, 1155 bp, Corynebacterium glutamicum
  CDS (101)..(1132): RXN00283
gcgttggcattggcgtttttagcgcgctatgacgccctcatcatggccttcgtagccatgtggactgtcggatttatgacatggcgcgcacgataccgccgtggcttccgcgaccgcatcggattcgcacttgtcgacatgctgctcctcgtctggccgatcggcttcgccttcgtcgcctggactggcgccaagctggctcactaccggcgaactctttgcccaattcacctccacagacggcaacgctgcgatcatcgcagcatccggcggcggcgccatagggccccaagcgcttttcgacgcctccgtccgcaccttcctcatctccccagctctcctactcgtcgcagtagttgcagtcttttttgcttatcgacgccgcgaccccgaacccatcatccccttagctctcatcggctctgtggtgttcttccaaatcattacctactcacttggatctaccttcggcctgctgcgctttttcctcaccgccctgccgctcaccattatcttgctgttccaaattatcccgccccgccaccgattcccctcactgcgaccaggtgcgtgctaccgcgatcgcgtcaccggcaagtacgtgcccaaaacaatcaccggtgttttagttctcgcgatcttcggcggcaccggcatcaccctgtacggcatgagcagtgctaactgggcgccccaggaatatgccatccaagaactagttttcaacatgggatcgccatcgcaggacgccgtccacaccctgaacaccttctccactgaaatggatgtcgccgatttcgtcgactccctaaaccttggagacggcgaagtccttctctccaccacctacggcttcgccgtcctcaccgcatcaaacaaccaaaagcaattcatcatcccctccgacgaagacttcatcaccaccctcaacgaacccgctgagcacggcgttaagtacatcctcgccctcccacgcgaaggtcgcggcgccaccgacccgatcaacctgcgctacccagacatgtatgaaaccggcagccacatcgccacgatggaaatcgaattcatcaatcaaggccaaggacaaccaaattggcgcctctatcgggtgctcaccacacctgaacagtcgtagactctttgtaactaccgttg

SEQ ID NO: 180 - protein, 344 aa, Corynebacterium glutamicum
VASATASDSHLSTCCSSSGRSASPSSPGLAPSWLTTGELFAQFTSTDGNAAIIAASGGGAIGPQALFDASVRTFLISPALLLVAVVAVFFAYRRRDPEPIIPLALIGSVVFFQIITYSLGSTFGLLRFFLTALPLTIILLFQIIPPRHRFPSLRPGACYRDRVTGKYVPKTITGVLVLAIFGGTGITLYGMSSANWAPQEYAIQELVFNMGSPSQDAVHTLNTFSTEMDVADFVDSLNLGDGEVLLSTTYGFAVLTASNNQKQFIIPSDEDFITTLNEPAEHGVKYILALPREGRGATDPINLRYPDMYETGSHIATMEIEFINQGQGQPNWRLYRVLTTPEQS

SEQ ID NO: 181 - DNA, 1251 bp, Corynebacterium glutamicum
  CDS (101)..(1228): FRXA00283
gaagctccgttcatttacgccactctctgggcggtgcgcaggctgattcggtggagttctacggaaaacgtccacagacctcattacctgtggttttgcgttggcattggcgtttttagcgcgctatgacgccctcatcatggccttcgtagccatgtggactgtcggatttatgacatggcgcgcacgataccgccgtggcttccgcgaccgcatcggattcgcacttgtcgacatgctgctcctcgtctggccgatcggcttcgccttcgtcgcctggactggcgccagctggctcactaccggcgaactctttgcccaattcacctccacagacggcaacgctgcgatcatcgcagcatccggcggcggcgccatagggccccaagcgcttttcgacgcctccgtccgcaccttcctcatctccccagctctcctactcgtcgcagtagttgcagtcttttttgcttatcgacgccgcgaccccgaacccatcatccccttagctctcatcggctctgtggtgttcttccaaatcattacctactcacttggatctaccttcggcctgctgcgctttttcctcaccgccctgccgctcaccattatcttgctgttccaaattatcccgccccgccaccgattcccctcactgcgaccaggtgcgtgctaccgcgatcgcgtcaccggcaagtacgtgcccaaaacaatcaccggtgttttagttctcgcgatcttcggcggcaccggcatcaccctgtacggcatgagcagtgctaactgggcgccccaggaatatgccatccaagaactagttttcaacatgggatcgccatcgcaggacgccgtccacaccctgaacaccttctccactgaaatggatgtcgccgatttcgtcgactccctaaaccttggagacggcgaagtccttctctccaccacctacggcttcgccgtcctcaccgcatcaaacaaccaaaagcaattcatcatcccctccgacgaagacttcatcaccaccctcaacgaacccgctgagcacggcgttaagtacatcctcgccctcccacgcgaaggtcgcggcgccaccgacccgatcaacctgcgctacccagacatgtatgaaaccggcagccacatcgccacgatggaaatcgaattcatcaatcaaggccaaggacaaccaaattggcgcctctatcgggtgctcaccacacctgaacagtcgtagactctttgtaactaccgttg

SEQ ID NO: 182 - protein, 376 aa, Corynebacterium glutamicum
LALAFLARYDALIMAFVAMWTVGFMTWRARYRRGFRDRIGFALVDMLLLVWPIGFAFVAWTGASWLTTGELFAQFTSTDGNAAIIAASGGGAIGPQALFDASVRTFLISPALLLVAVVAVFFAYRRRDPEPIIPLALIGSVVFFQIITYSLGSTFGLLRFFLTALPLTIILLFQIIPPRHRFPSLRPGACYRDRVTGKYVPKTITGVLVLAIFGGTGITLYGMSSANWAPQEYAIQELVFNMGSPSQDAVHTLNTFSTEMDVADFVDSLNLGDGEVLLSTTYGFAVLTASNNQKQFIIPSDEDFITTLNEPAEHGVKYILALPREGRGATDPINLRYPDMYETGSHIATMEIEFINQGQGQPNWRLYRVLTTPEQS

SEQ ID NO: 183 - DNA, 459 bp, Corynebacterium glutamicum
  CDS (101)..(436): RXN00334
ataagccccgcatgggatatgagaaaaggaatgcacgatgagtattgaatttccgttaggtaatccagcgcctgcacagtggttttctggcgaggtccatatggccaagcttgatgacaacgtgcagattgagactgtgaacgtgtcttttgaggcaggcggtcgcaccaattggcacactcacccagtcggtcaaaacataattgtgctgtcgggcttgggcatttatgaggcggagggggagcctgctcgactcctggagcctggcgatgttgttttcgcagccgccggggttcgccactggcacggcgccgtgtctggtgcaccgatgttccacgtggtggttaacctcaaaggcatcgacggcgagaccgtcgattgggaggagccggtcgacgaggagcactaccgcagcgtgagcgcggagctacaaagataaaaatgcttttcgacgtccac

SEQ ID NO: 184 - protein, 112 aa, Corynebacterium glutamicum
MAKLDDNVQIETVNVSFEAGGRTNWHTHPVGQNIIVLSGLGIYEAEGEPARLLEPGDVVFAAAGVRHWHGAVSGAPMFHVVVNLKGIDGETVDWEEPVDEEHYRSVSAELQR

SEQ ID NO: 185 - DNA, 459 bp, Corynebacterium glutamicum; identical to SEQ ID NO: 183
  CDS (101)..(436): FRXA00334

SEQ ID NO: 186 - protein, 112 aa, Corynebacterium glutamicum; identical to SEQ ID NO: 184

SEQ ID NO: 187 - DNA, 1263 bp, Corynebacterium glutamicum
  CDS (101)..(1240): RXN00338
tcttagaaggcgtagtcacaccattaaccttgccagaatttttcaaggcttggctagacttgggaaacgaacatgcggtaccaaccaggggagttaatgcgtgagtgatgtaaccgttggcgatattcgccgcattttggatgaggcttatccgccggcgttggcggaaagctgggacaaagtggggctgatctgcggtgatccaacagagtcggtgaagcgtgtcggtttagcactcgattgcacccaggcagtggccgacaaggctgtggacatgggtttggacatgctgatcattcaccacccattgctgctgcgtggggtgacgtctgttgctgcggatgagccaaaaggcaaggtcattcacaccctaattcgcggcggggtggcactgttttccgcgcacactaatgcggattccgcgcgcccaggtgtcaacgataaactcgccgagctcgtcggcatcacggccgggcgacccatcgcgacacggcttttaggcggcatggacaaatggggcgtgcacgttctgcccaaggatgcagcgtacctaaagaagatgcttttcgacgcaggtgccggtgcgatcggcgactaccgagagtgtgcctttgagatcgaaggaaccgggcagtttaggcccgtggagggggcgaatccggcagagggggacgtcgataagctttttaaatcccttgagctgcgcatcgagtttgttgcaccgcgcaacctgcgcgcccggctcacgtcggtgctgcgggaggctcatccgtatgaggagcctgccttcgatattgttgaaatgcacagcgctgagagtttagaaaatgcgaccggattgggtcgtgtgggtgaattgccggagccgatgcgcctcgcggatttcgtgcaacaagtggccaacaacctgcctgtcaccgaatggggcgtgcgcgctaccggcgatcctgaacaaatggtgtcccgtgtggcggtttcatcagggtcgggtgacagtttcttaaacgatgtgattaagctcggagtggacgtttatgtcacttctgatctgcgccaccatccagttgatgaatatctccgagaaggtggccctgcagtaatcgatactgcacactgggccagcgaatttccatggacttcccaagcccaagaaattttgcaggacaaagccccacaggttgaagttgatgtgatttcgatccgcacagacccctggaccatgtctgcgcgagcagtgaactaaattcttgagaactaaaaaag

SEQ ID NO: 188 - protein, 380 aa, Corynebacterium glutamicum
VSDVTVGDIRRILDEAYPPALAESWDKVGLICGDPTESVKRVGLALDCTQAVADKAVDMGLDMLIIHHPLLLRGVTSVAADEPKGKVIHTLIRGGVALFSAHTNADSARPGVNDKLAELVGITAGRPIATRLLGGMDKWGVHVLPKDAAYLKKMLFDAGAGAIGDYRECAFEIEGTGQFRPVEGANPAEGDVDKLFKSLELRIEFVAPRNLRARLTSVLREAHPYEEPAFDIVEMHSAESLENATGLGRVGELPEPMRLADFVQQVANNLPVTEWGVRATGDPEQMVSRVAVSSGSGDSFLNDVIKLGVDVYVTSDLRHHPVDEYLREGGPAVIDTAHWASEFPWTSQAQEILQDKAPQVEVDVISIRTDPWTMSARAVN

SEQ ID NO: 189 - DNA, 806 bp, Corynebacterium glutamicum
  CDS (1)..(783): FRXA00338
gtcggcatcacggccgggcgacccatcgcgacacggcttttaggcggcatggacaaatggggcgtgcacgttctgcccaaggatgcagcgtacctaaagaagatgcttttcgacgcaggtgccggtgcgatcggcgactaccgagagtgtgcctttgagatcgaaggaaccgggcagtttaggcccgtggagggggcgaatccggcagagggggacgtcgataagctttttaaatcccttgagctgcgcatcgagtttgttgcaccgcgcaacctgcgcgcccggctcacgtcggtgctgcgggaggctcatccgtatgaggagcctgccttcgatattgttgaaatgcacagcgctgagagtttagaaaatgcgaccggattgggtcgtgtgggtgaattgccggagccgatgcgcctcgcggatttcgtgcaacaagtggccaacaacctgcctgtcaccgaatggggcgtgcgcgctaccggcgatcctgaacaaatggtgtcccgtgtggcggtttcatcagggtcgggtgacagtttcttaaacgatgtgattaagctcggagtggacgtttatgtcacttctgatctgcgccaccatccagttgatgaatatctccgagaaggtggccctgcagtaatcgatactgcacactgggccagcgaatttccatggacttcccaagcccaagaaattttgcaggacaaagccccacaggttgaagttgatgtgatttcgatccgcacagacccctggaccatgtctgcgcgagcagtgaactaaattcttgagaactaaaaaag

SEQ ID NO: 190 - protein, 261 aa, Corynebacterium glutamicum
VGITAGRPIATRLLGGMDKWGVHVLPKDAAYLKKMLFDAGAGAIGDYRECAFEIEGTGQFRPVEGANPAEGDVDKLFKSLELRIEFVAPRNLRARLTSVLREAHPYEEPAFDIVEMHSAESLENATGLGRVGELPEPMRLADFVQQVANNLPVTEWGVRATGDPEQMVSRVAVSSGSGDSFLNDVIKLGVDVYVTSDLRHHPVDEYLREGGPAVIDTAHWASEFPWTSQAQEILQDKAPQVEVDVISIRTDPWTMSARAVN

SEQ ID NO: 191 - DNA, 310 bp, Corynebacterium glutamicum
  CDS (101)..(310): FRXA00318
tcttagaaggcgtagtcacaccattaaccttgccagaatttttcaaggcttggcttgacttgggaaacgaacatgcggtaccaaccaggggaggtaatgcgtgagtgatgtaaccgttggcgatattctccgcattttggatgaggcttatccgccggcgttggcggaaagctgggacaaagtggtgctgatctgcgttgatccaacagagtcggtgaagcgtgttggtttagcactcgattgcacccaggcactggccgacaaggctgtggacatgggtttggacatgctgatcattcaccacccatta

SEQ ID NO: 192 - protein, 70 aa, Corynebacterium glutamicum
VSDVTVGDILRILDEAYPPALAESWDKVVLICVDPTESVKRVGLALDCTQALADKAVDMGLDMLIIHHPL

SEQ ID NO: 193 - DNA, 552 bp, Corynebacterium glutamicum
  CDS (101)..(529): RXN00342
cggtaatgtgcaattcggatatatcaatagccccgcggtttcatgttgaatccatgtaatcgaaaaacacatcggggcccacacgaggaggattattaaagtggccgacgctccgggcgcagtcaagcaaggtgcccaggattatgctcaactactcggcattcaatcgggtcatatcgttcaagaaattggatgggatgaagattccgacacgctgatcagcgagtccatcgaagatgcaatcggtgaggaactactcgatgaagaaaccgacgagctgtgcgatgtcgtgctgctctggtggcgcgaggatgacggcgatctcgtcgacggacttgtggattccatccgctccctcgctgagaatggtcgtatctgggtgttgactcctggcattggtaaagaaggagccctggctcctggagttatctctgaatcagctcaactggcaggtctcgtgcagaccaaggcagaacgtctcggtaattggcaaggttcttgcctcgtccagcgtggaaacaagaagccttaacaatcgctaatttccacggc

SEQ ID NO: 194 - protein, 143 aa, Corynebacterium glutamicum
VADAPGAVKQGAQDYAQLLGIQSGHIVQEIGWDEDSDTLISESIEDAIGEELLDEETDELCDVVLLWWREDDGDLVDGLVDSIRSLAENGRIWVLTPGIGKEGALAPGVISESAQLAGLVQTKAERLGNWQGSCLVQRGNKKP

SEQ ID NO: 195 - DNA, 524 bp, Corynebacterium glutamicum
  CDS (73)..(501): FRXA00342
tagccccgcggtttcatgttgaatccatgtaatcgaaaacacatcggggcccacacgaggagaattattaaagtggccgacgctccgggcgcagtcaagcaaggtgcccaggattatgctcaactactcggcattcaatcgggtcatatcgttcaagaaattggatgggatgaagattccgacacgctgatcagcgagtccatcgaagatgcaatcggtgaggaactactcgatgaagaaaccgacgagctgtgcgatgtcgtgctgctctggtggcgcgaggatgacggcgatctcgtcgacggacttgtggattccatccgctccctcgctgagaatggtcgtatctgggtgttgactcctggcattggtaaagaaggagccctggctcctggagttatctctgaatcagctcaactggcaggtctcgtgcagaccaaggcagaacgtctcggtaattggcaaggttcttgcctcgtccagcgtggaaacaagaagccttaacaatcgctaatttccacggc

SEQ ID NO: 196 - protein, 143 aa, Corynebacterium glutamicum; identical to SEQ ID NO: 194

SEQ ID NO: 197 - DNA, 1002 bp, Corynebacterium glutamicum
  CDS (101)..(979): RXN00344
cggcacggttggcgatgtcatgcagtccgaaaaactcagcgaactctacaacgcacccgtcacggtggctcgcatcaacgacagaatcgtggtggtttaagtggatctatccacctggctttccgacacccaatatctcatcagcgtcgatttcgtccagcacgcactcatcgcctccgcgctgttgggcctgctctccggtgtgatcgcgccgctcatcgtggtgcgccaacagtccttcgcagtccacggcaccgccgaactcgccctcatgggagccgccgccgcgctgctcttcggattgaatgtaggcggcggtgcagtgatcggttccgtggtcgccgcgatcctactggcattactcggcatgaaacaacaagattccgccgtcggtgccgtgatgagtttcggactcggtctgtccgtgctgttcattcacctctaccccggccgaagctccaccgcgttctccctgctcacagggcaaatcgttggtgtttcctcatcatcgctgtggatccttgtggcagtcaccgtgatcgtggttagcgccgtggtgattttctggcgcccgctgcttttcgccagcgccgatccgatcatggcgcaggcctccggagtaaacgtccgattcatcgccgttgccttcgcagttctggttggcctcaccacgtcccagtccgtgcagattgtcggtgcgctgctggtcatggcattgctgatcactcccggcgcggccgctgtggcggtgaccgccaatccagtgaaagccgtggtgctggcagtcatcttcgcggaagtatcggctgtcggtggcctgctattgtcgctagcgcctggtttgccggtgagtgtttttgtcaccaccatctcttttgtgatttacctggtctgccgcctgatcggttggctccgcggccgtggagctcagcgtgacgaagatgcttatcgacgccgccagcacgatcaccaccctcactaggcgtttcgaagtcctatttc

SEQ ID NO: 198 - protein, 293 aa, Corynebacterium glutamicum
VDLSTWLSDTQYLISVDFVQHALIASALLGLLSGVIAPLIVVRQQSFAVHGTAELALMGAAAALLFGLNVGGGAVIGSVVAAILLALLGMKQQDSAVGAVMSFGLGLSVLFIHLYPGRSSTAFSLLTGQIVGVSSSSLWILVAVTVIVVSAVVIFWRPLLFASADPIMAQASGVNVRFIAVAFAVLVGLTTSQSVQIVGALLVMALLITPGAAAVAVTANPVKAVVLAVIFAEVSAVGGLLLSLAPGLPVSVFVTTISFVIYLVCRLIGWLRGRGAQRDEDAYRRRQHDHHPH

SEQ ID NO: 199 - DNA, 594 bp, Corynebacterium glutamicum
  CDS (1)..(579): FRXA00344
atgagtttcggactcggtctgtccgtgctgttcattcacctctaccccggccgaagctccaccgcgttctccctgctcacagggcaaatcgttggtgtttcctcatcatcgctgtggatccttgtggcagtcaccgtgatcgtggttagcgccgtggtgattttctggcgcccgctgcttttcgccagcgccgatccgatcatggcgcaggcctccggagtaaacgtccgattcatcgccgttgccttcgcagttctggttggcctcaccacgtcccagtccgtgcagattgtcggtgcgctgctggtcatggcattgctgatcactcccggcgcggccgctgtggcggtgaccgccaatccagtgaaagccgtggtgctggcagtcatcttcgcggaagtatcggctgtcggtggcctgctattgtcgctagcgcctggtttgccggtgagtgtttttgtcaccaccatctcttttgtgatttacctggtctgccgcctgatcggttggctccgcggccgtggagctcagcgtgacgaagatgcttatcgacgccgccagcacgatcaccaccctcactaggcgtttcgaagt

SEQ ID NO: 200 - protein, 193 aa, Corynebacterium glutamicum
MSFGLGLSVLFIHLYPGRSSTAFSLLTGQIVGVSSSSLWILVAVTVIVVSAVVIFWRPLLFASADPIMAQASGVNVRFIAVAFAVLVGLTTSQSVQIVGALLVMALLITPGAAAVAVTANPVKAVVLAVIFAEVSAVGGLLLSLAPGLPVSVFVTTISFVIYLVCRLIGWLRGRGAQRDEDAYRRRQHDHHPH

SEQ ID NO: 201 - DNA, 816 bp, Corynebacterium glutamicum
  CDS (101)..(793): RXN00353
ctttcatcaggaccgaaagcgaacgtttcgtattgttgagccttttggttccaccacggatgcgctgatctattttcatggctcccagcagtcaggatctgtggggcgcagcttcaccaacaggacttttgatccgttgccgttcatggtggtttatccggatggggtggatcagcattggaatgatgcgcggttgggtttggatgaaaatacccgccatttaggcattgatgatgtggggttctttgtaaaactcgccacgcacttgggcaacacgtatggcatcaagaggatctttattgttggctattccaacggtgggcagatggtgttgcggctcatgcatgaggttcccaagatgctcagtggcgctgcaaccattgcatccaacatgccagttgcagagaatacgctgccgcaggtgaaaaccttcaagacacatccggtgccttatttggcgatggctggaactgccgatactttttcaccgtatgagggtggcgatgccggtattggtcgcgaacaccgccgtggcgtgggcatgtccgcctttgattcagctgcctatattgccgcccgaaacggactgaccgaacaccgccacgacgtgattgatgatgtggtgtcgatcgatacctgggatggagaaaatcccgttgagttttggacactcaacgggatcggccacttggtaccaagtgggaaaacttatccagaatttctaggcccctcaaccacatcagtgatagcggctgaggagattgggaagttctttgatggggtcaggcgtcgataagctcaagctttaaaaacgca

SEQ ID NO: 202 - protein, 231 aa, Corynebacterium glutamicum
VGRSFTNRTFDPLPFMVVYPDGVDQHWNDARLGLDENTRHLGIDDVGFFVKLATHLGNTYGIKRIFIVGYSNGGQMVLRLMHEVPKMLSGAATIASNMPVAENTLPQVKTFKTHPVPYLAMAGTADTFSPYEGGDAGIGREHRRGVGMSAFDSAAYIAARNGLTEHRHDVIDDVVSIDTWDGENPVEFWTLNGIGHLVPSGKTYPEFLGPSTTSVIAAEEIGKFFDGVRRR

SEQ ID NO: 203 - DNA, 816 bp, Corynebacterium glutamicum; identical to SEQ ID NO: 201
  CDS (101)..(793): FRXA00353

SEQ ID NO: 204 - protein, 231 aa, Corynebacterium glutamicum; identical to SEQ ID NO: 202

SEQ ID NO: 205 - DNA, 936 bp, Corynebacterium glutamicum
  CDS (101)..(913): RXN00354
ggcttgtcggtaaggctgcagggtagcgggagtttccttcagattggaagttctttaattttctcgattatgtacctcatttacgcgtaaagtttggggcatgggaaagttacttttcgtagacatcggtggcacactgctggattactcaaatgaagttccgcgttcggccgttgacgcgatccgtaaggcacgcgccaaaggacaccgcgtgtacttgagctctggtcgaagcagcgctgaggtgacttctcagttgtgggatatcggagtggatggcctcattggcgcaaatggtggatatgtggaaagcgcacaggagtctgtgttccaccgccgtttgtcgggtgaggagacccgccacattgtggagtggctctacaaccgtggtttggagttttatctcgagtccaacaacggtttgtatgcaagccgtggtttccgtgaggcttctaagccagtgctgtctcgcctttcggagaagaccgacgtgacagtcgatagcatgtacccggatatgttctggggcgcgagccttgatcgtgacgatgtgaacaagatcagttacatcttcaattctcaggaagatttggacgcagcgcgtgaggcgttccctaacctggagcacaccacgtggggtggtcagacgggtgcgttgttcggcacgatcggtgtgtctgtcaacaagaagatcggcgtggatcgcctgctgaagtacctgaacgcagatcgcgcaaacaccattgcgttcggcgacagcgatgaggatctctccctatttgaggcgagcgcttacggcgtcgcgatgggcgaggccaccgaatcgctcaaggctgctgctgacctggtcacggatgctgttgggcaggacggcttgcgcaatgcgtttttaaagcttgagcttatcgacgcctgaccccatcaaagaacttccca

SEQ ID NO: 206 - protein, 271 aa, Corynebacterium glutamicum
MGKLLFVDIGGTLLDYSNEVPRSAVDAIRKARAKGHRVYLSSGRSSAEVTSQLWDIGVDGLIGANGGYVESAQESVFHRRLSGEETRHIVEWLYNRGLEFYLESNNGLYASRGFREASKPVLSRLSEKTDVTVDSMYPDMFWGASLDRDDVNKISYIFNSQEDLDAAREAFPNLEHTTWGGQTGALFGTIGVSVNKKIGVDRLLKYLNADRANTIAFGDSDEDLSLFEASAYGVAMGEATESLKAAADLVTDAVGQDGLRNAFLKLELIDA

SEQ ID NO: 207 - DNA, 1470 bp, Corynebacterium glutamicum
  CDS (101)..(1447): RXN00362
cactttttgggtgaaaattccacgaagttaatgccgctttaagtcaattcaatcacatgtaacatgctacggttttttcggtcacttaaaggaggcgcttatgggaatcattgctctgctcgtttttatcgcaattgccgtgatattgaatgtgtttttgaaacgagatatttcagaagcattgctagttggattagtaggaactgcgcttgtcggcggtgtaaatgcaccgacattactgattgatgctgtagtggatgctgctcagtcggaagttactttcgcaggtatggcctttgttttcatgggcatcgttgtgcaatcaactggattgattgatcgattaatcgcaatccttaactcgatttttggtcggcttcgaggtggcgcaggttatgtttccactcttggatctgcgctcattggactcatcgctggatcaacggctggaaactccgcgacggttggctcagtgacgatcccttggatgaaaaagacgggatggactgctgaaaggtccgcaacgttagtcgcgggcaactctggccttggtgttgcgttgcctcccaattcaacaatgttcatcattttggcattgccagctgcagcagcttcttcggcctctcaggtgtacattgctttggcttgtggtggtgcgtatgcagtgctctaccgcttagcggtcgtcttttactggacacgtaaagataaaattcctgccacccctgatgatcaacgggtgtcattcggtgaggcaatgaagactggatggcgttcaccgttgatcttccttggaattttgatccccgtaatcctcacaatcggcccattgtctgaatggttaaagacacatggagttggggagtctggtgttaaatcgatgtcgatcatcgtgtgggtgccaattctgattacggcaattgctctgattgaagggcgtaaacgaattgctaacaacatggcacactttagggttcagatctccaaggacttgccacaatttgccaccgtaggaatttcgttgttttctgcgcttgcagcagcgaacatcatggaagaactgggtgttggcccgcagttgtctaactggcttgattccatggacctacctaagtctgtcatggtgatcattgtctgcatcatgtgcattgtggtggcaacgccactgtcgtcaacagcaaccgcggctgcgattggtgctcccgctgtcgctgcgttggctgcggtaggtattgatccaactgtggcgatcgtagtgatcttgctgtgcacttccactgaaggtgcatccccgccggtgggcgcgccgatttacctttctgctgcgatcgccgatgcaaacccaacgaaaatgttcgtaccactgattacgtactttgttgtccccatgattctgcttgcttggctagttggaatgggattcttaccagtgattgttcctacgggttaaaggggtaaaaatgaactcaa

SEQ ID NO: 208 - protein, 449 aa, Corynebacterium glutamicum
MGIIALLVFIAIAVILNVFLKRDISEALLVGLVGTALVGGVNAPTLLIDAVVDAAQSEVTFAGMAFVFMGIVVQSTGLIDRLIAILNSIFGRLRGGAGYVSTLGSALIGLIAGSTAGNSATVGSVTIPWMKKTGWTAERSATLVAGNSGLGVALPPNSTMFIILALPAAAASSASQVYIALACGGAYAVLYRLAVVFYWTRKDKIPATPDDQRVSFGEAMKTGWRSPLIFLGILIPVILTIGPLSEWLKTHGVGESGVKSMSIIVWVPILITAIALIEGRKRIANNMAHFRVQISKDLPQFATVGISLFSALAAANIMEELGVGPQLSNWLDSMDLPKSVMVIIVCIMCIVVATPLSSTATAAAIGAPAVAALAAVGIDPTVAIVVILLCTSTEGASPPVGAPIYLSAAIADANPTKMFVPLITYFVVPMILLAWLVGMGFLPVIVPTG

SEQ ID NO: 209 - DNA, 983 bp, Corynebacterium glutamicum
  CDS (1)..(960): FRXA00362
gatgaaaagacgggatggactgctgaaaggtccgcaacgttagtcgcgggcaactctggccttggtgttgcgttgcctcccaattcaacaatgttcatcattttggcattgccagctgcagcagcttcttcggcctctcaggtgtacattgctttggcttgtggtggtgcgtatgcagtgctctaccgcttagcggtcgtcttttactggacacgtaaagataaaattcctgccacccctgatgatcaacgggtgtcattcggtgaggcaatgaagactggatggcgttcaccgttgatcttccttggaattttgatccccgtaatcctcacaatcggcccattgtctgaatggttaaagacacatggagttggggagtctggtgttaaatcgatgtcgatcatcgtgtgggtgccaattctgattacggcaattgctctgattgaagggcgtaaacgaattgctaacaacatggcacactttagggttcagatctccaaggacttgccacaatttgccaccgtaggaatttcgttgttttctgcgcttgcagcagcgaacatcatggaagaactgggtgttggcccgcagttgtctaactggcttgattccatggacctacctaagtctgtcatggtgatcattgtctgcatcatgtgcattgtggtggcaacgccactgtcgtcaacagcaaccgcggctgcgattggtgctcccgctgtcgctgcgttggctgcggtaggtattgatccaactgtggcgatcgtagtgatcttgctgtgcacttccactgaaggtgcatccccgccggtgggcgcgccgatttacctttctgctgcgatcgccgatgcaaacccaacgaaaatgttcgtaccactgattacgtactttgttgtccccatgattctgcttgcttggctagttggaatgggattcttaccagtgattgttcctacgggttaaaggggtaaaaatgaactcaa

SEQ ID NO: 210 - protein, 320 aa, Corynebacterium glutamicum
DEKTGWTAERSATLVAGNSGLGVALPPNSTMFIILALPAAAASSASQVYIALACGGAYAVLYRLAVVFYWTRKDKIPATPDDQRVSFGEAMKTGWRSPLIFLGILIPVILTIGPLSEWLKTHGVGESGVKSMSIIVWVPILITAIALIEGRKRIANNMAHFRVQISKDLPQFATVGISLFSALAAANIMEELGVGPQLSNWLDSMDLPKSVMVIIVCIMCIVVATPLSSTATAAAIGAPAVAALAAVGIDPTVAIVVILLCTSTEGASPPVGAPIYLSAAIADANPTKMFVPLITYFVVPMILLAWLVGMGFLPVIVPTG

SEQ ID NO: 211 - DNA, 439 bp, Corynebacterium glutamicum
  CDS (101)..(439): RXN00373
cacgtggcggatctgcgcgctaagggcgagctgccgccgccgaggaagaaacgcaggcgtcgaaaagcgtcttaaaaggtttttcactagggtgttgtccatggacatccagcagctagacgccgaaacaacagcatggaaagacagcctcctgcgcgccgcacaggaggctggttttcattttgagccaccgaaactcttcgaggattttgagaccatggtggagcagtacaagcaggcagctgcgagcgacccggacattgatgtcactgatattcagcaaatgtggggcatcgtggtgggggagtacctgcgcgaaaaaatgggcatggaatgggtcgtcatcaccgatgactacggcactgacctcgcgattctagccacggcacccaacggggaccacgtatattcctgccccatcatcgtggtgggcaagcgc

SEQ ID NO: 212 - protein, 113 aa, Corynebacterium glutamicum
MDIQQLDAETTAWKDSLLRAAQEAGFHFEPPKLFEDFETMVEQYKQAAASDPDIDVTDIQQMWGIVVGEYLREKMGMEWVVITDDYGTDLAILATAPNGDHVYSCPIIVVGKR

SEQ ID NO: 213 - DNA, 439 bp, Corynebacterium glutamicum; identical to SEQ ID NO: 211
  CDS (101)..(439): FRXA00373

SEQ ID NO: 214 - protein, 113 aa, Corynebacterium glutamicum; identical to SEQ ID NO: 212

SEQ ID NO: 215 - DNA, 528 bp, Corynebacterium glutamicum
  CDS (101)..(505): RXN00390
ggaaatagaccgttaatagctggtctttacatttgccagaaagctccgacgaaaccccaatagttgacacggaaactaattcattctagctttagtgaccatgtcaactaccagggaaattgcattcctcatcgcacgtatcctcttgggcgtcatcctcatcgcccacggctgggacaagttcgccatcacaggacttgaaggcgtcaccggcttcttcgattcactcggcatcccagcagccggcatcgccgcaatagctgctgcagtcgtcgagctcctaggaggaatccttatcatcctaggagtatttacccgcatcgttgccgccttcgttgccatagacatgctcttcgcagcactgtttgcgcacgtctcctccggcatctttgtcaccaacaatggttgggaactcaccggcgcaatcggcgctggcgcgctgcttctcatcgcagttggcgcaagtgcatggagcatcgacggggttctggcaaaacgcaaggcctaaatctagcgccacaactccga

SEQ ID NO: 216 - protein, 135 aa, Corynebacterium glutamicum
MSTTREIAFLIARILLGVILIAHGWDKFAITGLEGVTGFFDSLGIPAAGIAAIAAAVVELLGGILIILGVFTRIVAAFVAIDMLFAALFAHVSSGIFVTNNGWELTGAIGAGALLLIAVGASAWSIDGVLAKRKA

SEQ ID NO: 217 - DNA, 528 bp, Corynebacterium glutamicum; identical to SEQ ID NO: 215
  CDS (101)..(505): FRXA00390

SEQ ID NO: 218 - protein, 135 aa, Corynebacterium glutamicum; identical to SEQ ID NO: 216

SEQ ID NO: 219 - DNA, 438 bp, Corynebacterium glutamicum
  CDS (101)..(415): RXN00399
ggacattgctatgtcgtgagttgtagtaaccccaaagcccacggattaatcaatagtgaaattcaatgattttcttttcccacaggcctaaacttaaatcatgagccacaacgacagcccaaactttgctcgccgagcgctcaattggctccgccaaggttatccaaccggtgttccgcggcacgatactttcgctctgttttacgttttggagcgcgaacttactgaggaagatctcaatgagctcgcagagcttctcatcgcggaaggtgagaacaatgggctgcacgataatcccattacgcgtgaaaaaatcggcaagctgatcacgcatgttcacagtcagccacctgaggatgaagacatcgatcgaattcagaaaaagctgcaggctgagggcttccccacccgcaattaattaattggagttttgttgtt

SEQ ID NO: 220 - protein, 105 aa, Corynebacterium glutamicum
MSHNDSPNFARRALNWLRQGYPTGVPRHDTFALFYVLERELTEEDLNELAELLIAEGENNGLHDNPITREKIGKLITHVHSQPPEDEDIDRIQKKLQAEGFPTRN

SEQ ID NO: 221 - DNA, 438 bp, Corynebacterium glutamicum; identical to SEQ ID NO: 219
  CDS (101)..(415): FRXA00399

SEQ ID NO: 222 - protein, 105 aa, Corynebacterium glutamicum; identical to SEQ ID NO: 220

SEQ ID NO: 223 - DNA, 1673 bp, Corynebacterium glutamicum
  CDS (1)..(1650): RXN00416
ctggcgtcttacttaagcccaactgcgctggtggttgcggtgttggctattccgctgtctgcgacccgcctgtatttggacggaatcagcgttgaccagggctttagaactcagtttttaacccgcatggctgacgatatcggcttgtcggacatgaactacatcgatatgcctaccttctaccctgctggatggttctggctcggtggtcgcttggccaatcttttggggctgcccggttgggaagctttccagccatgggcaattgtgtccatggcagttgctgcttctgtgttagttccagtgtggcagcgcatcaccggttccctgccggtggcaacaggcattgcgttggtgacaacctgcattatcttggcgatgaattccgaagagccctacgctgcaatcgttgcgatgggtattccagcgatgctcgtgctggcttcccgcattgccaagggcgataagtttgcgcttgccggcggcattatttacttgggtgtttcggctactttctatactttgttcaccggtgctatcgcgctttctgcggtcgcggtgtgcatcgtggtggcggctattgtgcagcgctccatcaaaccactgctgtggcttgcagtgctgggtggtggatccattgtcattgcgttgatttcttggggtccttaccttctggcctccatcaacggagcggagcgctctggcgattccgcaacacactacctgcctcttgaaggcacccaattcccggttcctttcttggcatcaagcgttgtgggactgttgtgtcttgttggcctgatctatttggtggtgcgtttccacaacaatgaggtgcgcgcgatgtgggtcggcatcgcagtgttttatgcctggatgggcatgtccatggcgatcacgcttttgggcaacacgttgcttggattccgtcttgatacggtgctggtgcttatttttgccacggctggagtgttgggcattgcagatttccgccttgccagtgtgtatcagctctaccccacccaaatcacagagcgcacggccacccatctgaccaatctaattgtggtcctcgtgctgcttggcggcctctactacgcgcaagatctgccgcagaagaacgcacgagctatcgatctggcctataccgatactgatggctacggcgagcgcgcggatctgtatccggccggagctgcacgttattacaaggacatcaacgatcatctgcttgatcaaggattcgagccttccgaaactgtcgtgctgacagacgaactcgatttcatgtcctactacccttatcgcggataccaagcttttacttcccactacgccaacccgcttggtgagttcggaaacaggaacgcattcatcgaagatctcgcgatccgaagctgggatgagttggctgatcctcaacaattcagcgacgccttgaacacctctccatggacgatccctgaggtgttcatcttccgtggctccatcgatgatcctgacgccggttggaaatacgacgtggctgaagatctgtacccgaacaatccaaacgtgcgcttccgcggcgtgtactttaacccggagtcatttgatcagatgtggcagaccaagcaagtgggacctttcgtggtggtaacgcacaatgagtaattcctcaccaaacgacccaa

SEQ ID NO: 224 - protein, 550 aa, Corynebacterium glutamicum
LASYLSPTALVVAVLAIPLSATRLYLDGISVDQGFRTQFLTRMADDIGLSDMNYIDMPTFYPAGWFWLGGRLANLLGLPGWEAFQPWAIVSMAVAASVLVPVWQRITGSLPVATGIALVTTCIILAMNSEEPYAAIVAMGIPAMLVLASRIAKGDKFALAGGIIYLGVSATFYTLFTGAIALSAVAVCIVVAAIVQRSIKPLLWLAVLGGGSIVIALISWGPYLLASINGAERSGDSATHYLPLEGTQFPVPFLASSVVGLLCLVGLIYLVVRFHNNEVRAMWVGIAVFYAWMGMSMAITLLGNTLLGFRLDTVLVLIFATAGVLGIADFRLASVYQLYPTQITERTATHLTNLIVVLVLLGGLYYAQDLPQKNARAIDLAYTDTDGYGERADLYPAGAARYYKDINDHLLDQGFEPSETVVLTDELDFMSYYPYRGYQAFTSHYANPLGEFGNRNAFIEDLAIRSWDELADPQQFSDALNTSPWTIPEVFIFRGSIDDPDAGWKYDVAEDLYPNNPNVRFRGVYFNPESFDQMWQTKQVGPFVVVTHNE

SEQ ID NO: 225 - DNA, 350 bp, Corynebacterium glutamicum
  CDS (1)..(327): FRXA00416
acttcccactacgccaacccgcttggtgagttcggaaacaggaacgcattcatcgaagatctcgcgatccgaagctggaatgagttggctgatcctcaacaattcagcgacgccttgaacacctctccatggacgatccctgaggtgttcatcttccgtggctccatcgatgatcctgacgccggttggaaatacgatgtggctgaagatctgtacccgaacaatccaaacgtgcgcttccgcggcgtgtactttaacccggagtcatttgatcagatgtggcagaccaagcaagtgggacctttcgtggtggtaacgcacaatgagtaattcctcaccaaacgacccaa

SEQ ID NO: 226 - protein, 109 aa, Corynebacterium glutamicum
TSHYANPLGEFGNRNAFIEDLAIRSWNELADPQQFSDALNTSPWTIPEVFIFRGSIDDPDAGWKYDVAEDLYPNNPNVRFRGVYFNPESFDQMWQTKQVGPFVVVTHNE

SEQ ID NO: 227 - DNA, 1065 bp, Corynebacterium glutamicum
  CDS (1)..(1065): FRXA00418
ctggcgtcttacttaagcccaactgcgctggtggttgcggtgttggctattccgctgtctgcgacccgcctgtatttggacggaatcagcgttgaccagggctttagaactcagtttttaacccgcatggctgacgatatcggcttgtcggacatgaactacatcgatatgcctaccttctaccctgctggatggttctggctcggtggtcgcttggccaatcttttggggctgcccggttgggaagctttccagccatgggcaattgtgtccatggcagttgctgcttctgtgttagttccagtgtggcagcgcatcaccggttccctgccggtggcaacaggcattgcgttggtgacaacctgcattatcttggcgatgaattccgaagagccctacgctgcaatcgttgcgatgggtattccagcgatgctcgtgctggcttcccgcattgccaagggcgataagtttgcgcttgccggcggcattatttacttgggtgtttcggctactttctatactttgttcaccggtgctatcgcgctttctgcggtcgcggtgtgcatcgtggtggcggctattgtgcagcgctccatcaaaccactgctgtggcttgcagtgctgggtggtggatccattgtcattgcgttgatttcttggggtccttaccttctggcctccatcaacggagcggagcgctctggcgattccgcaacacactacctgcctcttgaaggcacccaattcccggttcctttcttggcatcaagcgttgtgggactgttgtgtcttgttggcctgatctatttggtggtgcgtttccacaacaatgaggtgcgcgcgatgtgggtcggcatcgcagtgttttatgcctggatgggcatgtccatggcgatcacgcttttgggcaacacgttgcttggattccgtcttgatacggtgctggtgcttatttttgccacggctggagtgttgggcattgcagatttccgccttgccagtgtgtatcagctctaccccacccaaatcacagagcgcacggccacccatctgaccaatctaatt

SEQ ID NO: 228 - protein, 355 aa, Corynebacterium glutamicum
LASYLSPTALVVAVLAIPLSATRLYLDGISVDQGFRTQFLTRMADDIGLSDMNYIDMPTFYPAGWFWLGGRLANLLGLPGWEAFQPWAIVSMAVAASVLVPVWQRITGSLPVATGIALVTTCIILAMNSEEPYAAIVAMGIPAMLVLASRIAKGDKFALAGGIIYLGVSATFYTLFTGAIALSAVAVCIVVAAIVQRSIKPLLWLAVLGGGSIVIALISWGPYLLASINGAERSGDSATHYLPLEGTQFPVPFLASSVVGLLCLVGLIYLVVRFHNNEVRAMWVGIAVFYAWMGMSMAITLLGNTLLGFRLDTVLVLIFATAGVLGIADFRLASVYQLYPTQITERTATHLTNLI

SEQ ID NO: 229 - DNA, 1017 bp, Corynebacterium glutamicum
  CDS (101)..(994): RXN00422
aagcgccgggcgcggaaggcgctggctgaggccttcggcgcggaggtccagccactgccgcttgacaccgaataggacaaatgggtctatcctggggcgcatgcccacgaattatgcacgcgacaacgtcatttccttggcgtctgcccgcgagcagcgttccgggaaacccgagcccaaacccgaactaacactcatcgtccgcgccaccaacgtgcaagcggacggcgaggtccacaggcaaattgggttgaactcggcgatgagcctggacgagctgcacaatgtactcaacatcgttttcggtgttggcggcgagcagtcaccctggcgtttcgaagaccaattccaccaacccagcgcccccgacaccaacctcggcgaactcctgcccgaacccggcgacttcctgttttacttctggggcctgtggcaattcaacctgcaatgcgtggaaatgtacccgcgcgacaacggcaccccgcgcgcgctgtgcatcggcggctccggcggcctcggcgacgacttcgaccaagccaccatcaacgccgaactcaccggcaccgacaccatccgcgacgtcctctccggcgtgcgccccgaagtcatcgacctcgtcgaccgcaccggcgtcttcgacttcatcccactgctccaagcgctcgacctcaaaagagaaccgcttatcgacgccacccgctaccacacctgccgcacgctgccagtggaaaacagcgccgaagcctccgacgcattctggtcctgcgtactcgccctgtcctgcctcggaaacgacgaacttttcatcgaagtgatcgaatccacaatgagcaccctcggctgggtcgccgacgacggctccccactacgtgcaccagagatcaccagcgcctgcgaagcctccctgaagatactcgcggaactcggtggctacggcccagagcggcttgcccccgtggatcgcctggacatttatagggagctgctgtgtttctaggtattgtgtaacctcgtgtc

SEQ ID NO: 230 - protein, 298 aa, Corynebacterium glutamicum
MPTNYARDNVISLASAREQRSGKPEPKPELTLIVRATNVQADGEVHRQIGLNSAMSLDELHNVLNIVFGVGGEQSPWRFEDQFHQPSAPDTNLGELLPEPGDFLFYFWGLWQFNLQCVEMYPRDNGTPRALCIGGSGGLGDDFDQATINAELTGTDTIRDVLSGVRPEVIDLVDRTGVFDFIPLLQALDLKREPLIDATRYHTCRTLPVENSAEASDAFWSCVLALSCLGNDELFIEVIESTMSTLGWVADDGSPLRAPEITSACEASLKILAELGGYGPERLAPVDRLDIYRELLCF

SEQ ID NO: 231 - DNA, 523 bp, Corynebacterium glutamicum
  CDS (101)..(523): FRXA00422
aagcgccgggcgcggaaggcgctggctgaggccttcggcgcggaggtccagccactgccgcttgacaccgaataggacaaatgggtctatcctggggcgcatgcccacgaattatgcacgcgacaacgtcatttccttggcgtctgcccgcgagcagcgttccgggaaacccgagcccaaacccgaactaacactcatcgtccgcgccaccaacgtgcaagcggacggcgaggtccacaggcaaattgggttgaactcggcgatgagcctggacgagctgcacaatgtactcaacatcgttttcggtgttggcggcgagcagtcaccctggcgtttcgaagaccaattccaccaacccagcgcccccgacaccaacctcggcgaactcctgcccgaacccggcgacttcctgttttacttctggggcctgtggcaattcaacctgcaatgcgtggaaatgtacccgcgcgacaacggcaccccgcgcgcgctgtgcatcggcggctccggcggcctcggcgac

SEQ ID NO: 232 - protein, 141 aa, Corynebacterium glutamicum
MPTNYARDNVISLASAREQRSGKPEPKPELTLIVRATNVQADGEVHRQIGLNSAMSLDELHNVLNIVFGVGGEQSPWRFEDQFHQPSAPDTNLGELLPEPGDFLFYFWGLWQFNLQCVEMYPRDNGTPRALCIGGSGGLGD

SEQ ID NO: 233 - DNA, 543 bp, Corynebacterium glutamicum
  CDS (101)..(520): RXN00447
gagcacggcatcgtgattcgcgcgttccccgagggtgcgcgcatttcggtgaccaacgccgaggaaactgacaagctgctgcgcgcgtgggaggccatcaatgctgggtagtctttggcgttttgcggtgcgcaccgcagcaggcgcggtggcgttgtgggtggttattaagcttatcgacggcatctccctgagttttcccaccacacctctctatcaggacggtcagcacgacaatctgctgacattcctggcggtggcagcaatcattgtcgtgttgaatgccacggtgaaacccgtcttgaagctgcttggtttgccgttgacaatcatcaccttgggtctgttctcgctggtcatcaacgcggtaatcatgctgctggcggagtatgtgtcagatttgatcggtttcggtctacgcattgaaaccttcggtgcggccttctggggtgcgattgtgctggcgttagtgaactgggttcttggccccattaccggcctcctcggtgcaaaaaaggactaaccatggcggatctgagcatt

SEQ ID NO: 234 - protein, 140 aa, Corynebacterium glutamicum
MLGSLWRFAVRTAAGAVALWVVIKLIDGISLSFPTTPLYQDGQHDNLLTFLAVAAIIVVLNATVKPVLKLLGLPLTIITLGLFSLVINAVIMLLAEYVSDLIGFGLRIETFGAAFWGAIVLALVNWVLGPITGLLGAKKD

SEQ ID NO: 235 - DNA, 400 bp, Corynebacterium glutamicum
  CDS (101)..(400): FRXA00447
gagcacggcatcgtgattcgcgcgttccccgagggtgcgcgcatttcggtgaccaacgccgaggaaactgacaagctgctgcgcgcgtgggaggccatcaatgctgggtagtctttggcgttttgcggtgcgcaccgcagcaggcgcggtggcgttgtgggtggttattaagcttatcgacggcatctccctgagttttcccaccacacctctctatcaggacggtcagcacgacaatctgctgacattcctggcggtggcagcaatcattgtcgtgttgaatgccacggtgaaacccgtcttgaagctgcttggtttgccgttgacaatcatcaccttgggtctgttctcgctggtcatcaacgcggtaatcatgctgctggcggagtatgtgtcagat

SEQ ID NO: 236 - protein, 100 aa, Corynebacterium glutamicum
MLGSLWRFAVRTAAGAVALWVVIKLIDGISLSFPTTPLYQDGQHDNLLTFLAVAAIIVVLNATVKPVLKLLGLPLTIITLGLFSLVINAVIMLLAEYVSD

SEQ ID NO: 237 - DNA, 873 bp, Corynebacterium glutamicum
  CDS (101)..(850): RXN00455
gaagtgtctggccgattggctaacaatctctagttaaatcccgcctcatgaaaccacgatgaaaccaacatgagagttttttcatccacgttttctggctatggttgtggacgtgcaaaatcaatcacacaccccagaaacccagcctcaacctgggcagggcgcagccaagaaaacccccgttgcgtccggaaactccacgttcattcacattcagccaagcttgtaccccattttgctggcgctgtttgttgcagtctttctaatttcaaatatcaccgcaaccaagggcgtagaaatcggcccgttggtgacagacggtgcgttcttcctcttccccatctcatatgtgttgggcgatgttctagccgaatgttacggcttcaaatccactcgtcgtgccattcttactggttttggcatcacgatgctcgcggcgctgtctttctacatttccatctggctgcctggcgcaagtttctgggaaggccaagaagctttcgaagcaacgctcggccttgttccacagatcatcgtggcatcactggcgggctatattgtgggtcagctgctcaacgccaaagttctggtggctatcaaaaagcgcacgggtgaaaagtccctgtgggcgcgcctgattggttccaccgttgtcggagaatttgtcgataccctgctgttttgcgccatcgcagcgccagtgatcggtattgccaccgccccggatttcatcaactacgttgtggtgggcttcgtgtggaaaacccttctagaggtcatcctcatgcccatcacctacgcagtcattaggtgggtgaaacgccgcgaaggttatgaaaccttcgacgcgtagtaccggcctaagaattcttc

SEQ ID NO: 238 - protein, 250 aa, Corynebacterium glutamicum
MVVDVQNQSHTPETQPQPGQGAAKKTPVASGNSTFIHIQPSLYPILLALFVAVFLISNITATKGVEIGPLVTDGAFFLFPISYVLGDVLAECYGFKSTRRAILTGFGITMLAALSFYISIWLPGASFWEGQEAFEATLGLVPQIIVASLAGYIVGQLLNAKVLVAIKKRTGEKSLWARLIGSTVVGEFVDTLLFCAIAAPVIGIATAPDFINYVVVGFVWKTLLEVILMPITYAVIRWVKRREGYETFDA

SEQ ID NO: 239 - DNA, 641 bp, Corynebacterium glutamicum
  CDS (1)..(618): FRXA00455
attttgctggcgctgtttgttgcagtctttctaatttcaaatatcaccgcaaccaagggcgtagaaatcggcccgttggtgacagacggtgcgttcttcctcttccccatctcatatgtgttgggcgatgttctagccgaatgttacggcttcaaatccactcgtcgtgccattcttactggttttggcatcacgatgctcgcggcgctgtctttctacatttccatctggctgcctggcgcaagtttctgggaaggccaagaagctttcgaagcaacgctcggccttgttccacagatcatcgtggcatcactggcgggctatattgtgggtcagctgctcaacgccaaagttctggtggctatcaaaaagcgcacgggtgaaaagtccctgtgggcgcgcctgattggttccaccgttgtcggagaatttgtcgataccctgctgttttgcgccatcgcagcgccagtgatcggtattgccaccgccccggatttcatcaactacgttgtggtgggcttcgtgtggaaaacccttctagaggtcatcctcatgcccatcacctacgcagtcattaggtgggtgaaacgccgcgaaggttatgaaaccttcgacgcgtagtaccggcctaagaattcttc

SEQ ID NO: 240 - protein, 206 aa, Corynebacterium glutamicum
ILLALFVAVFLISNITATKGVEIGPLVTDGAFFLFPISYVLGDVLAECYGFKSTRRAILTGFGITMLAALSFYISIWLPGASFWEGQEAFEATLGLVPQIIVASLAGYIVGQLLNAKVLVAIKKRTGEKSLWARLIGSTVVGEFVDTLLFCAIAAPVIGIATAPDFINYVVVGFVWKTLLEVILMPITYAVIRWVKRREGYETFDA

SEQ ID NO: 241 - DNA, 912 bp, Corynebacterium glutamicum
  CDS (101)..(889): RXN00473
ggggcagctgtggatttttcacaaccaccccttttctcacaccagccccgcatgaacaggctggttgcacaccgttgaaaatgagtgtttactggaactcatgagtggaacaggtgttcgaaagttgtggggagatggcactccggtgtcgctccctgacctttcaggattaagtagagcggagcgcattgatgcgttgcgttcacgcatgtccaccatgggtgctgcggtgccaaagtttgagccgtcggtggaagaaagtgctgaacaaaagcaggattctctcgccgaaaaacaggacatagttgcagttccttccgctttttctgatcttttccctggggatggtttgccgcgtcgtgcggttactcaattggttgaacagccacttgtggtggtggacttcctggctcatattactgcccagggtggacacgctgcggtgattgggtggaaggatttagcctacgccggggtgattgattccggaggtgtgtgcgagaacatcattgctattccaaatcctggtacggagccactgaatgtggcagcggtgctgtgtgaggggttggatgtggtcgtgtacaaaggcccggagatttccctgtcgccaaccagagcgaggccgttgctgggaaagctgaggcaggggactgctgccttggtgatggttggcacgaaagtaagctcaccggcgctgtcggtggatgcagagatcactgattatgttggcattggtgcaggtagtgggcgtattcgtggcgttgagatgcaggtgcgggctgtgtcgaaaactcacggtgtgcgcagcggaaaagtcctgatcagtaggcctcaggatgcagcattgcttgagcctgaacagccaacaacgttgcgggcggtcccatgacgcgggtgatggcattgtgg

SEQ ID NO: 242 - protein, 263 aa, Corynebacterium glutamicum
MSGTGVRKLWGDGTPVSLPDLSGLSRAERIDALRSRMSTMGAAVPKFEPSVEESAEQKQDSLAEKQDIVAVPSAFSDLFPGDGLPRRAVTQLVEQPLVVVDFLAHITAQGGHAAVIGWKDLAYAGVIDSGGVCENIIAIPNPGTEPLNVAAVLCEGLDVVVYKGPEISLSPTRARPLLGKLRQGTAALVMVGTKVSSPALSVDAEITDYVGIGAGSGRIRGVEMQVRAVSKTHGVRSGKVLISRPQDAALLEPEQPTTLRAVP

SEQ ID NO: 243 - DNA, 888 bp, Corynebacterium glutamicum
  CDS (101)..(865): FRXA00473
ccaccccttttctcacaccagccccgcatgaacaggctggttgcacaccgttgaaaatgagtgtttactggaactcatgagtggaacaggtgttcgaaagttgtggggagatggcactccggtgtcgctccctgacctttcaggattaagtagagcggagcgcattgatgcgttgcgttcacgcatgtccaccatgggtgctgcggtgccaaagtttgagccgtcggtggaagaaagtgctgaacaaaagcaggattctctcgccgaaaaacaggacatagttgcagttccttccgctttttctgatcttttccctggggatggtttgccgcgtcgtgcggttactcaattggttgaacagccacttgtggtggtggacttcctggctcatattactgcccagggtggacacgctgcggtgattgggtggaaggatttagcctacgccggggtgattgattccggaggtgtgtgcgagaacatcattgctattccaaatcctggtacggagccactgaatgtggcagcggtgctgtgtgaggggttggatgtggtcgtgtacaaaggcccggagatttccctgtcgccaaccagagcgaggccgttgctgggaaagctgaggcaggggactgctgccttggtgatggttggcacgaaagtaagctcaccggcgctgtcggtggatgcagagatcactgattatgttggcattggtgcaggtagtgggcgtattcgtggcgttgagatgcaggtgcgggctgtgtcgaaaactcacggtgtgcgcagcggaaaagtcctgatcagtaggcctcaggatgcagcattgcttgagcctgaacagccaacaacgttgcgggcggtcccatgacgcgggtgatggcattgtgg

SEQ ID NO: 244 - protein, 255 aa, Corynebacterium glutamicum
LWGDGTPVSLPDLSGLSRAERIDALRSRMSTMGAAVPKFEPSVEESAEQKQDSLAEKQDIVAVPSAFSDLFPGDGLPRRAVTQLVEQPLVVVDFLAHITAQGGHAAVIGWKDLAYAGVIDSGGVCENIIAIPNPGTEPLNVAAVLCEGLDVVVYKGPEISLSPTRARPLLGKLRQGTAALVMVGTKVSSPALSVDAEITDYVGIGAGSGRIRGVEMQVRAVSKTHGVRSGKVLISRPQDAALLEPEQPTTLRAVP

SEQ ID NO: 245 - DNA, 2418 bp, Corynebacterium glutamicum
  CDS (101)..(2395): RXN00485
tcaacttcggcgacgaggtgggcgctatttttcattgtttttcgcgattttcgcttcggttgcattgactgttagcgccactgcgttgacaaattctttggtgtccagtgttaatgatctttttgccaagccgtatgaaaacgctgatcttgtggtcacggtgtctgcgaaaaacgaagattcctttgcagcttttgagcaacaattagctacgacacctggtgttgaagctctggcttttgatcaaaattttgcagcctctgtaaagcaatcagacgggatttacgccagtacttcagtccagtcaatttcggaaggcccactgcagtggcggccaatcctagaaggccgattgccccaaggacctggtgagattgcagtaacaacggccccgggtgcgcctgaagttggtgagcacgtatccattcgcctgtcccaaaacactgaggacactgaggttcttgtggttggcgtggtggagccagcggcgcaggaaactttaggtggcgcaccgttcgttgtggcgtctcctgatgcgctgatggagtggaattcttccggtgtgcggggtgaattccgagtggcaacttccgatcctgcctcgctagaggctgcaagctttagcgacgctacggtggtggttgcttcggcggaggggcacgtcgataagcttgctgattcttatttgggccagcgagatcgctatttcttgctgctcgcagcgtttgtggcagtggctgctgccgtggcgtttttggtggtcttttctgcatattcggtgctcactggtgagcgagttcgcgagttcgggctgattcgttcagtgggcgcatcgacgccgcagattttggggtcagtgatttttgaagccggcatcctcggtgtggtggctgctggttttggtgcgcccgccggattgatggcggcgcgtttgttggcggataatgccgcacgttttggcattcgtgtgcccattgatgtgattgatctgccaagtagcacgatgtggctcatcgctggcgtcggcgtggtgatgtccgtgattgcggcattaccggcagtgttcagtgtgtgcagaaaatccgcagtggaatcactgagtacgcctgctatttcgaggacttccccctggttcggtgcattatggttgctgctcgcgggcattgtgggcgccggcggaatgtgggcgtatgaggcaacctcggactaccgcggcatgcgttcagtggctttatccatcgccggttcaggcgctttggtgtgtgcgttgttgattgccacggcggtgctcgtgccctggttattgcacgtattctccaggattgtgggcggcaccgtcccaacacttcagttgggattggcgtttgcagcaaagcagaaatctcgttcggcggcgctgatcgctgtgattcttgctggttctgcattaagctccgctgttctgcatggccaggcacatatcggcacgcatttggtggccgtggctaaaggcatgggcggcacagacatgatggttacagcgcttgatggggaaatccccgccggaatgctggaggaaatctctagcatcgacggcgtgaaaactgccatcgcgccagccaccaccgctgtggaattggaagattccggcaatttctctgtgctcatgctcgctgaagaagacggagcctccgtgatgcgcgcaggcgatactggtgcaccagctggtggccttgttttgggcagaaactctcctgaccaggatgcttacccggccggccaggctgcaaacatcattgtcgcggataccccaacgcaggcggaaatcttccacagcgacaactacttctccatgatcgacccagcactcgccaccggccccagcaccacacgcaacgtactgatcctgctcgacggcgactccaaccaggcccccgacaacgccacggcgcaggcggtacgcaagaccatttcgcttttcgacggacgatactccatcaccgagggtttctccgcccgccaaaacacttttgaactggtttcccgcatcaccaccatgtccacactgcttgccatcgtggccttagcgatcgctgccgttggcctgatcaacacagtggcactcaccatttctgagcgtgcccgcgatcgttatttgctgcgcaccattggactgacctcaactggtcagattctggtgatggctattgaaatgatcgcgctctcattgccggctgccattgttggtgcagtttcgggaggattcttaggcagattcgttgccagttctgccaccaacaccgctgcgacggcaccacttcaagtagacattctcggcggaacggttctcgcgatggtcgcaggatctgtactgtgcgcgctcatcgtgctggcgaacaaacgacgtcgggtggtttgattataaaatccaaaaatcga

SEQ ID NO: 246 - protein, 765 aa, Corynebacterium glutamicum
VSSVNDLFAKPYENADLVVTVSAKNEDSFAAFEQQLATTPGVEALAFDQNFAASVKQSDGIYASTSVQSISEGPLQWRPILEGRLPQGPGEIAVTTAPGAPEVGEHVSIRLSQNTEDTEVLVVGVVEPAAQETLGGAPFVVASPDALMEWNSSGVRGEFRVATSDPASLEAASFSDATVVVASAEGHVDKLADSYLGQRDRYFLLLAAFVAVAAAVAFLVVFSAYSVLTGERVREFGLIRSVGASTPQILGSVIFEAGILGVVAAGFGAPAGLMAARLLADNAARFGIRVPIDVIDLPSSTMWLIAGVGVVMSVIAALPAVFSVCRKSAVESLSTPAISRTSPWFGALWLLLAGIVGAGGMWAYEATSDYRGMRSVALSIAGSGALVCALLIATAVLVPWLLHVFSRIVGGTVPTLQLGLAFAAKQKSRSAALIAVILAGSALSSAVLHGQAHIGTHLVAVAKGMGGTDMMVTALDGEIPAGMLEEISSIDGVKTAIAPATTAVELEDSGNFSVLMLAEEDGASVMRAGDTGAPAGGLVLGRNSPDQDAYPAGQAANIIVADTPTQAEIFHSDNYFSMIDPALATGPSTTRNVLILLDGDSNQAPDNATAQAVRKTISLFDGRYSITEGFSARQNTFELVSRITTMSTLLAIVALAIAAVGLINTVALTISERARDRYLLRTIGLTSTGQILVMAIEMIALSLPAAIVGAVSGGFLGRFVASSATNTAATAPLQVDILGGTVLAMVAGSVLCALIVLANKRRRVV

SEQ ID NO: 247 - DNA, 2166 bp, Corynebacterium glutamicum
  CDS (101)..(2143): FRXA00485
tgcagcctctgtaaagcaatcagacgggatttacgccagtacttcagtccagtcaatttcggaaggcccactgcagtggcggccaatcctagaaggccgattgccccaaggacctggtgagattgcagtaacaacggccccgggtgcgcctgaagttggtgagcacgtatccattcgcctgtcccaaaacactgaggacactgaggttcttgtggttggcgtggtggagccagcggcgcaggaaactttaggtggcgcaccgttcgttgtggcgtctcctgatgcgctgatggagtggaattcttccggtgtgcggggtgaattccgagtggcaacttccgatcctgcctcgctagaggctgcaagctttagcgacgctacggtggtggttgcttcggcggaggggcacgtcgataagcttgctgattcttatttgggccagcgagatcgctatttcttgctgctcgcagcgtttgtggcagtggctgctgccgtggcgtttttggtggtcttttctgcatattcggtgctcactggtgagcgagttcgcgagttcgggctgattcgttcagtgggcgcatcgacgccgcagattttggggtcagtgatttttgaagccggcatcctcggtgtggtggctgctggttttggtgcgcccgccggattgatggcggcgcgtttgttggcggataatgccgcacgttttggcattcgtgtgcccattgatgtgattgatctgccaagtagcacgatgtggctcatcgctggcgtcggcgtggtgatgtccgtgattgcggcattaccggcagtgttcagtgtgtgcagaaaatccgcagtggaatcactgagtacgcctgctatttcgaggacttccccctggttcggtgcattatggttgctgctcgcgggcattgtgggcgccggcggaatgtgggcgtatgaggcaacctcggactaccgcggcatgcgttcagtggctttatccatcgccggttcaggcgctttggtgtgtgcgttgttgattgccacggcggtgctcgtgccctggttattgcacgtattctccaggattgtgggcggcaccgtcccaacacttcagttgggattggcgtttgcagcaaagcagaaatctcgttcggcggcgctgatcgctgtgattcttgctggttctgcattaagctccgctgttctgcatggccaggcacatatcggcacgcatttggtggccgtggctaaaggcatgggcggcacagacatgatggttacagcgcttgatggggaaatccccgccggaatgctggaggaaatctctagcatcgacggcgtgaaaactgccatcgcgccagccaccaccgctgtggaattggaagattccggcaatttctctgtgctcatgctcgctgaagaagacggagcctccgtgatgcgcgcaggcgatactggtgcaccagctggtggccttgttttgggcagaaactctcctgaccaggatgcttacccggccggccaggctgcaaacatcattgtcgcggataccccaacgcaggcggaaatcttccacagcgacaactacttctccatgatcgacccagcactcgccaccggccccagcaccacacgcaacgtactgatcctgctcgacggcgactccaaccaggcccccgacaacgccacggcgcaggcggtacgcaagaccatttcgcttttcgacggacgatactccatcaccgagggtttctccgcccgccaaaacacttttgaactggtttcccgcatcaccaccatgtccacactgcttgccatcgtggccttagcgatcgctgccgttggcctgatcaacacagtggcactcaccatttctgagcgtgcccgcgatcgttatttgctgcgcaccattggactgacctcaactggtcagattctggtgatggctattgaaatgatcgcgctctcattgccggctgccattgttggtgcagtttcgggaggattcttaggcagattcgttgccagttctgccaccaacaccgctgcgacggcaccacttcaagtagacattctcggcggaacggttctcgcgatggtcgcaggatctgtactgtgcgcgctcatcgtgctggcgaacaaacgacgtcgggtggtttgattataaaatccaaaaatcga

SEQ ID NO: 248 - protein, 681 aa, Corynebacterium glutamicum
LPQGPGEIAVTTAPGAPEVGEHVSIRLSQNTEDTEVLVVGVVEPAAQETLGGAPFVVASPDALMEWNSSGVRGEFRVATSDPASLEAASFSDATVVVASAEGHVDKLADSYLGQRDRYFLLLAAFVAVAAAVAFLVVFSAYSVLTGERVREFGLIRSVGASTPQILGSVIFEAGILGVVAAGFGAPAGLMAARLLADNAARFGIRVPIDVIDLPSSTMWLIAGVGVVMSVIAALPAVFSVCRKSAVESLSTPAISRTSPWFGALWLLLAGIVGAGGMWAYEATSDYRGMRSVALSIAGSGALVCALLIATAVLVPWLLHVFSRIVGGTVPTLQLGLAFAAKQKSRSAALIAVILAGSALSSAVLHGQAHIGTHLVAVAKGMGGTDMMVTALDGEIPAGMLEEISSIDGVKTAIAPATTAVELEDSGNFSVLMLAEEDGASVMRAGDTGAPAGGLVLGRNSPDQDAYPAGQAANIIVADTPTQAEIFHSDNYFSMIDPALATGPSTTRNVLILLDGDSNQAPDNATAQAVRKTISLFDGRYSITEGFSARQNTFELVSRITTMSTLLAIVALAIAAVGLINTVALTISERARDRYLLRTIGLTSTGQILVMAIEMIALSLPAAIVGAVSGGFLGRFVASSATNTAATAPLQVDILGGTVLAMVAGSVLCALIVLANKRRRVV

SEQ ID NO: 249 - DNA, 1149 bp, Corynebacterium glutamicum
  CDS (101)..(1126): RXN00496
ctgcagagatggtgggcagcaccccaggtgctgtacgagttgcccaacacagggcactcacgacacttcgaagcacacttgagcagcaggagaacaagtaatgactcgacgtctacatggtggtgagcaggatggccaggaacacgttaaaggacagctaaagcagctgttcgacgacgacgcgttcttgactgacctgtcccgcggcgttgatccctcagagggcgatgacgccctcgctggcctcctcctcgatttaacaaaggaagctcaggagccgccggcaacaatgccggattggtctactttgctccctggaattttggatcaggatcaggatttgccagtggaatccacttcggacaccacggttatgcaggcatcaaaccctgcaacccaagaattcgcacctgtttctatttctgatacccccaacactgcaactaattcagctgatgcagatgagtccgcaactgttgttccacttgcagcacgccgtgagaagcgtgccaagagcggatcaagcggggttcattcactggatgcttcggcaacccagcgcaaatctcacccattccttagcggtttggtgggtgctgcagctgcaactctagtcatcgcaggcggtggagcagcagtgtacaacgctgatgaaaactccccgttgtatggcatgaatcagcagctgtttggcaatcaagattctccaagcgtggtggagcttgcctccacgctggaagaagttgatagtcgtacagctagtggcgatgtggaaggggcacgtgctctactcgagcaggctcgagcaatgctggatggcatggcacctcctcgaaaggcgccgtcggaggcaacccgaacggttgaatctgaaccaggtactcagacgttgactgcaacggttactgaatccgcaagtccggaaccaccggtcacggaaactcaaactgttacctccaccgaggtacagacagtgacaaccactgcggttgctccaccggtctggactcctaatccagagccaacaaccacagctgccccgacttctacgccttcaactggtggcggtgagggaaccggcaatgatggtgactctggacttgtgccacctcagactcctggaaactaggtaaaaatataaaaactgct

SEQ ID NO: 250 - protein, 342 aa, Corynebacterium glutamicum
MTRRLHGGEQDGQEHVKGQLKQLFDDDAFLTDLSRGVDPSEGDDALAGLLLDLTKEAQEPPATMPDWSTLLPGILDQDQDLPVESTSDTTVMQASNPATQEFAPVSISDTPNTATNSADADESATVVPLAARREKRAKSGSSGVHSLDASATQRKSHPFLSGLVGAAAATLVIAGGGAAVYNADENSPLYGMNQQLFGNQDSPSVVELASTLEEVDSRTASGDVEGARALLEQARAMLDGMAPPRKAPSEATRTVESEPGTQTLTATVTESASPEPPVTETQTVTSTEVQTVTTTAVAPPVWTPNPEPTTTAAPTSTPSTGGGEGTGNDGDSGLVPPQTPGN

SEQ ID NO: 251 - DNA, 502 bp, Corynebacterium glutamicum
  CDS (101)..(502): FRXA00496
ctgcagagatggtgggcagcaccccaggtgctgtacgagttgcccaacacagggcactcacgacacttcgaagcacacttgagcagcaggagaacaagtaatgactcgacgtctacatggtggtgagcaggatggccaggaacacgttaaaggacagctaaagcagctgttcgacgacgacgcgttcttgactgacctgtcccgcggcgttgatccctcagagggcgatgacgccctcgctggcctcctcctcgatttaacaaaggaagctcaggagccgccggcaacaatgccggattggtctactttgctccctggaattttggatcaggatcaggatttgccagtggaatccacttcggacaccacggttatgcaggcatcaaaccctgcaacccaagaattcgcacctgtttctatttctgatacccccaacactgcaactaattcagctgatgcagatgagtccgcaactgttgttccacttgcagcacgccgtgag

SEQ ID NO: 252 - protein, 134 aa, Corynebacterium glutamicum
MTRRLHGGEQDGQEHVKGQLKQLFDDDAFLTDLSRGVDPSEGDDALAGLLLDLTKEAQEPPATMPDWSTLLPGILDQDQDLPVESTSDTTVMQASNPATQEFAPVSISDTPNTATNSADADESATVVPLAARRE

SEQ ID NO: 253 - DNA, 1845 bp, Corynebacterium glutamicum
  CDS (101)..(1822): RXN00503
aatccacgaaggtgcccaagaatcaccaatttcggtcggaactgatccttctttgtccgttgagaccccacaggtgttttaaacatttagtattagttccatgaaaccagtcttctccgttgaccaaatccgacgcgcagaaaacaccctttttgagcttcaggcagatccggatgagctgatgatctccgcggcatcggcggtggccgatgtcgcgttggcaatggtggacggccccgctccagcggtctccagtgaggagtcaatcctgctgctggtcggccccggtggcaacggtggcgacgccttgtatgcaggcgcgttccttgcagaagaaggccaccacgttgatgctttgctgttgggaaacggcaaagtccatcaatcagcattggcatattatgagtctttgggcgggcagatcatttccgattttccccctcactacctctaccgcctggtgattgatggtttgtttggcatcggtggtcggggagggctcaccccagagctggccagtttggtggagtctttttccgcttcaggtatccccattttggcgattgatgtgccgtctggcgtgcatgccgatagtggtgaactgccgcccggcgtgatggtgacggtggaaggatttgataatgatgcaccgatggcgcgtcagaaaattccggcacacattgacgctgatgtcacgatcacgtttggcggtttgagacgcgcccacgcggtcagtcctgcgtgtggtgaagtgctctgtgctgatatcaacatcgctggtggcggcggaaaatcgctgtccgctgagttgagtcaggtgcaggcagaagacgcgaccccgcagatgtttgcctccaaggcgtatcaacggaaagattcgctttttgagcgcgcgaatctcaaagctacggcgccacatatccataggatcggccagcactttaccgtgttgaacatggagcctggcccggatcatgataaatacagtggcggaattgtcggcattgttgcaggtagtggcacctatccaggtgctgctgtgctgtcggtgaaggcggctgtcagggccacaagcgccatggttcgatacgttggccctgcgttaaattttgtcatccagtcgctgccggaggtcgtcgcaacgcaatcacttgccaccgccggccgcgtgcaagcgtgggtgcacggccccggacgcgggctggaggctgagcaatcagccgagcttgcggagcttttgagccggcctgagcctgtgcttatcgacgccgacagcctctcattactccagctctcagcggagcttcggcaggcgttgcgcgagcgaaaagcaccaacggtgctcactccgcacaagggcgaatttgaacgcatcgcagcagaattacgctctgaaggcgtcgagattccccaagcggacaaagatcccattggtgctgcgcaagcgttagctaaagaatttgattgttgcgtactgctcaaggggaaatacaccgtcattgcagctcacgactttgtgcatgcgatcaacgctgggcattcctggttggctacacctggctctggcgatgtgttgtcaggtcttgtcggtgcacacttggctcaaagctacgcagaattaaaccgcttgccggagtttttccccgatgtgaccttgtctgattcggcgatttacacccagattgcacctgctgcgaccatccacgcggttgctgctgggttggccgcacgaaccgaatttgggtttgcgccgacctccgcaagtttgatcgctgatgccatccctgcagcgaccgccaaggtggatttgaagcgaattgtctagctctgcatgaattccgtatg

SEQ ID NO: 254 - protein, 574 aa, Corynebacterium glutamicum
MKPVFSVDQIRRAENTLFELQADPDELMISAASAVADVALAMVDGPAPAVSSEESILLLVGPGGNGGDALYAGAFLAEEGHHVDALLLGNGKVHQSALAYYESLGGQIISDFPPHYLYRLVIDGLFGIGGRGGLTPELASLVESFSASGIPILAIDVPSGVHADSGELPPGVMVTVEGFDNDAPMARQKIPAHIDADVTITFGGLRRAHAVSPACGEVLCADINIAGGGGKSLSAELSQVQAEDATPQMFASKAYQRKDSLFERANLKATAPHIHRIGQHFTVLNMEPGPDHDKYSGGIVGIVAGSGTYPGAAVLSVKAAVRATSAMVRYVGPALNFVIQSLPEVVATQSLATAGRVQAWVHGPGRGLEAEQSAELAELLSRPEPVLIDADSLSLLQLSAELRQALRERKAPTVLTPHKGEFERIAAELRSEGVEIPQADKDPIGAAQALAKEFDCCVLLKGKYTVIAAHDFVHAINAGHSWLATPGSGDVLSGLVGAHLAQSYAELNRLPEFFPDVTLSDSAIYTQIAPAATIHAVAAGLAARTEFGFAPTSASLIADAIPAATAKVDLKRIV

SEQ ID NO: 255 - DNA, 543 bp, Corynebacterium glutamicum
  CDS (101)..(520): RXN00504
aaggtggatttgaagcgaattgtctagctctgcatgaattccgtatgaattcttttctttcaagtggccgagatgtgaagcgcacggttaattgagaggcatgacctacggatttcttgtcaacacagatctcacccaccgcgcgattgactttgatttagaaaacgctgcgaagttcctcggcggtgccgatgatggccgcgtcgctgtcgctttccaagaggatggcaccttgtacgccgctctctacagcgccagcgcaaaagatgagggtgccgcagcaaacccagtagcatcccttggccgcaacgccgctgctaccggtgatggctccttcttctctgatccgaccactgcaatctgtggccctgtgatcttcgtgggggccgaaggcgaagacatcacgttggatgaaattgagcgaattaaggacggcattcgcgccgctcgtaactaccgcgatgattatccagaggaattcaacctgtggcgcaacgctgtatataacctgcgtacggcttaaagtttggctgccatgtgaat

SEQ ID NO: 256 - protein, 140 aa, Corynebacterium glutamicum
MTYGFLVNTDLTHRAIDFDLENAAKFLGGADDGRVAVAFQEDGTLYAALYSASAKDEGAAANPVASLGRNAAATGDGSFFSDPTTAICGPVIFVGAEGEDITLDEIERIKDGIRAARNYRDDYPEEFNLWRNAVYNLRTA

SEQ ID NO: 257 - DNA, 346 bp, Corynebacterium glutamicum
  CDS (101)..(346): FRXA00504
aaggtggatttgaagcgaattgtctagctctgcatgaattccgtatgaattcttttctttcaagtggccgagatgtgaagcgcacggttaattgagaggcatgacctacggatttcttgtcaacacagatctcacccaccgcgcgattgactttgatttagaaaacgctgcgaagttcctcggcggtgccgatgatggccgcgtcgctgtcgctttccaagaggatggcaccttgtacgccgctctctacagcgccagcgcaaaagatgagggtgccgcagcaaacccagtagcatcccttggccgcaacgccgctgctaccggtgatggctccttcttctctgat

SEQ ID NO: 258 - protein, 82 aa, Corynebacterium glutamicum
MTYGFLVNTDLTHRAIDFDLENAAKFLGGADDGRVAVAFQEDGTLYAALYSASAKDEGAAANPVASLGRNAAATGDGSFFSD

SEQ ID NO: 259 - DNA, 618 bp, Corynebacterium glutamicum
  CDS (101)..(595): RXN00505
ttgcggagcgtttagacaccattaactatgaggtagtgtgccgaccaaccggccgaactgtccgcgcatatgtttaagtgaatacgtttaaggagcagcaatgaaatctgagtttccggtatccggcacgaggcgttttgagcatgccgcagatacccaaaattttggggaagaattaggcaggcatctagaagctggcgatgtggtgattttggacggcccgctgggtgctggaaaaaccacatttactcaaggtatcgctcgtggattgcaggtgaaggggcgggtgacatcgccgacgtttgtgatcgcgagggaacaccgctcggaaatcggtgggccagatctgatccacatggatgcctaccgattgctgggcgaagacagcgaggatgctgatccgatcggtgcgctggactctttggatttggataccgatttggacttggctgtggttgttgcggaatggggcggtggcttggtggagcagatcgctgactcgtatcttttgattaccattgatcgagagaccgctgtgcaggaagacccggaatctgaggctcgaattttccattgggaatggcgcgaaggccgctgagaaagttttccacgctaaaa

SEQ ID NO: 260 - protein, 165 aa, Corynebacterium glutamicum
MKSEFPVSGTRRFEHAADTQNFGEELGRHLEAGDVVILDGPLGAGKTTFTQGIARGLQVKGRVTSPTFVIAREHRSEIGGPDLIHMDAYRLLGEDSEDADPIGALDSLDLDTDLDLAVVVAEWGGGLVEQIADSYLLITIDRETAVQEDPESEARIFHWEWREGR

SEQ ID NO: 261 - DNA, 275 bp, Corynebacterium glutamicum
  CDS (1)..(252): FRXA00505
gatctgatccacatggatgcctaccgattgctgggcgaagacagcgaggatgctgatccgatcggtgcgctggactctttggatttggataccgatttggacttggctgtggttgttgcggaatggggcggtggcttggtggagcagatcgctgactcgtatcttttgattaccattgatcgagagaccgctgtgcaggaagacccggaatctgaggctcgaattttccattgggaatggcgcgaaggccgctgagaaagttttccacgctaaaa

SEQ ID NO: 262 - protein, 84 aa, Corynebacterium glutamicum
DLIHMDAYRLLGEDSEDADPIGALDSLDLDTDLDLAVVVAEWGGGLVEQIADSYLLITIDRETAVQEDPESEARIFHWEWREGR

SEQ ID NO: 263 - DNA, 978 bp, Corynebacterium glutamicum
  CDS (101)..(955): RXN00507
gttcatgttgaactattgtgccaccaaccgcggacagaaatacgattggtgccggggttagtgccagtattgccccacgctttcaactatccttaaacacgtggctgagaatctgaacaaacacctgtccaaactgtccaagcgcggaccgcaccgcgtgctggtaggcgatatgaactacgccggcatcccgggcaaaatctacaccccagcagaaggcgacggcatcccaggtgtagctttcggccacgactggatgaaatccatcaagtactaccaccaaactttgcgacacctcgcgtcctggggcatcgctgttgccgccccagacaccgaaaatggcttcatgccagaccacaaaggtttcgcctctgacctcgaatcctccattcagattctcggcggcgtaaaactcggctccggaaacgtcaccgtcaacccagcctgcctcggtgtagtaggccacggcatgggtgctggggctgcagtactatccgcagcaaaccgcgacctcgtgcgcgcagtcggagcaatctacccagcgaaaacctccccctcagcaatcgacgccgccttcgctgtcaaagccccaggcctagtcatcggatcctccagcctcggcctctttgaatccggcgagccagcaaaactcgcagccaactgggccggcgatgtctgctaccgcgaatcagaaaaaggcaaccaacagggcttctctgaagacaccatgttcaaacttgtcgcaggaatcggcagcccacaaaccggagctcaagaaaccgtccgcggcctcctcaccggattccttctccaccaacttgccggagaaaagaaatacaaagcattctccgaaccagacgctgaagctaagaaagttgtctcctacttcggccaggagctgcaggaacatgccttccctaaggacacgtccccattcgcgttccttaacgagaagtagttcgcttttcttagtgggtg

SEQ ID NO: 264 - protein, 285 aa, Corynebacterium glutamicum
VAENLNKHLSKLSKRGPHRVLVGDMNYAGIPGKIYTPAEGDGIPGVAFGHDWMKSIKYYHQTLRHLASWGIAVAAPDTENGFMPDHKGFASDLESSIQILGGVKLGSGNVTVNPACLGVVGHGMGAGAAVLSAANRDLVRAVGAIYPAKTSPSAIDAAFAVKAPGLVIGSSSLGLFESGEPAKLAANWAGDVCYRESEKGNQQGFSEDTMFKLVAGIGSPQTGAQETVRGLLTGFLLHQLAGEKKYKAFSEPDAEAKKVVSYFGQELQEHAFPKDTSPFAFLNEK

SEQ ID NO: 265 - DNA, 978 bp, Corynebacterium glutamicum; identical to SEQ ID NO: 263
  CDS (101)..(955): FRXA00507

SEQ ID NO: 266 - protein, 285 aa, Corynebacterium glutamicum; identical to SEQ ID NO: 264

SEQ ID NO: 267 - DNA, 1632 bp, Corynebacterium glutamicum
  CDS (101)..(1609): RXN00510
acgcttttacccaaacaacccaagccgccgaggaagaagttaaacgattcgacaataccgacaaagtttttggtgccggatttgatgggattgatccgaagtgaatgatcctttagccggctacggagcagtgatctccgcactacaaggcgccagtggtgggatgtatcgcggaccggcgaaatccgaaggccagttgcgcgagatgtaccaaaccatcgaagggctagacaccagctcgttgcgcgaagctgccgaagcagcagtgggcggaacgaacgaagccagaatacaagggtgggtcggcccgctcttgaaattcttcgggacggttggcgggggaatgatcgccacggagatagctgaacgggcagtcgattggttcaaaaaccgtaatgatgtggaagaagtcagcgaagccgctgataaagccgccgatgcgatcgactccactgtcacagagtccgaccagggcatgatgcacattatccagcagctcttggacattgtgtctacgttgacgcagattcttggcagcatggatcgggggaaatttcctcaagaattccgggactgtgtccaaactggagctgatcttattgaccaggcaggggacatgcttgaaggattgtgcgctgatcgagatgatgcgatttcacagtgtttctccgcgttgaccgatcatggaaaacaagtttgtgaaactgagccaaagccgttgtgtagtgcagcttctgggggttcatctggtggagcgacttcttcggctgcggcctcttcaggtggttcaagctcgagcactgctagctctgggagttctggcggatcgagcagtgctgcggatagttcgacgtcgaccaatgctgaatccagtgttgaaaaggaaaagaccacacctgctgccgttgagaaacctgacgagaaaccagtggagaagccggttgaaaagacgccagaaaagccggtagaaaaacctgtcgagaagcaagagtgtgaagaaaagcctgaccctgacccggaaaaatgcaaaacagagccggtcgagtgtgagccaacaccgaaacctgaaacagagcctgaaccaaaaccgacacccacgcccacacccggaacaccaacaccaatacctgagctagagactgaggattgtgaacctggcaaggagacgggcacagactcagaatctgaatcggaagagtgcgcccccgagctcaatgacgttccagaagagtcggatctgattgggcaactcatcaagggagcaatcggtattgggattgttgttgtaggcgttgggctgttggtgaatttcctggagcagtgcgtccctgtgattgaagaagtacctgtgccggagcccgagcctatacctgaacccgctccgcagcctgagccaacttcagtgaaaccaccagagtctgaactagataaggtggctgagcctgcgccgaagccaattccacaagctaattacactgctgctgcagcaactaactattccgctcccgcgcacgctcccgttgtcccaattacgccggcagcacctgaagttccggcagcaccagaagtgcctgcaccggcggttaatcttcacaaggccggcgggtggtagcggtggagtatgcggaattt

SEQ ID NO: 268 - protein, 503 aa, Corynebacterium glutamicum
VNDPLAGYGAVISALQGASGGMYRGPAKSEGQLREMYQTIEGLDTSSLREAAEAAVGGTNEARIQGWVGPLLKFFGTVGGGMIATEIAERAVDWFKNRNDVEEVSEAADKAADAIDSTVTESDQGMMHIIQQLLDIVSTLTQILGSMDRGKFPQEFRDCVQTGADLIDQAGDMLEGLCADRDDAISQCFSALTDHGKQVCETEPKPLCSAASGGSSGGATSSAAASSGGSSSSTASSGSSGGSSSAADSSTSTNAESSVEKEKTTPAAVEKPDEKPVEKPVEKTPEKPVEKPVEKQECEEKPDPDPEKCKTEPVECEPTPKPETEPEPKPTPTPTPGTPTPIPELETEDCEPGKETGTDSESESEECAPELNDVPEESDLIGQLIKGAIGIGIVVVGVGLLVNFLEQCVPVIEEVPVPEPEPIPEPAPQPEPTSVKPPESELDKVAEPAPKPIPQANYTAAAATNYSAPAHAPVVPITPAAPEVPAAPEVPAPAVNLHKAGGW

SEQ ID NO: 269 - DNA, 300 bp, Corynebacterium glutamicum
  CDS (101)..(277): FRXA00509
cttttctggcgtcttttcaaccggcttctccactggtttctcgtcaggtttctcaacggcagcaggtgtggtcttttccttttcaacactggattcagcattggtcgacgtcgaactatccgcagcactgctcgatccgccagaactcccagagctagcagtgctcgagcttgaaccacctgaagaggccgcagccgaagaagtcgctccaccagatgaacccccagaagctgcactacacaacggctttggctcagtttcacaaacttgttttccatgatcggtcaacgcggagaaaca

SEQ ID NO: 270 - protein, 59 aa, Corynebacterium glutamicum
LVDVELSAALLDPPELPELAVLELEPPEEAAAEEVAPPDEPPEAALHNGFGSVSQTCFP

SEQ ID NO: 271 - DNA, 631 bp, Corynebacterium glutamicum
  CDS (101)..(631): FRXA00510
  modified_base (195): a, t, c, or g
  modified_base (205): a, t, c, or g
  modified_base (208): a, t, c, or g
  modified_base (265): a, t, c, or g
  modified_base (280): a, t, c, or g
  modified_base (282): a, t, c, or g
  modified_base (309): a, t, c, or g
  modified_base (318): a, t, c, or g
  modified_base (330): a, t, c, or g
  modified_base (333): a, t, c, or g
  modified_base (335): a, t, c, or g
  modified_base (338): a, t, c, or g
  modified_base (342): a, t, c, or g
  modified_base (352): a, t, c, or g
  modified_base (355): a, t, c, or g
  modified_base (369)..(370): a, t, c, or g
  modified_base (372): a, t, c, or g
  modified_base (375): a, t, c, or g
  modified_base (378)..(385): a, t, c, or g
gagcagtgctgcggatagttcgacgtcgaccaatgctgaatccagtgttgaaaaggaaaagaccacacctgctgccgttgagaaacctgacgagaaaccagtggagaagccggttgaaaagacgccagaaaagccggtagaaaaacctgtcgagaagcaagagtgtgaagaaaagcctgaccctgacccggaaanaatgcaaaancangagccggtcgagtgtgagccaacaccgaaacctgaaacagagcctgaaccaaaaccngacacccacgcccancnacccggaacaccaacaccaatacctgnagctagagnactgaggattgntgnanacnctgngcaaggagancgnggcacagactcagnnanatnctnnnnnnnngaatcggaagagtgcgcccccgagctcaatgacgttccagaagagtcggatctgattgggcaactcatcaagggagcaatcggtattgggattgttgttgtaggcgttgggctgttggtgaatttcctggagcagtgcgtccctgtgattgaagaagtacctgtgccggagcccgagcctatacctgaacccgctccgcagcctgagccaacttcagtgaaaccaccagagtctgaactagataag

SEQ ID NO: 272 - protein, 177 aa, Corynebacterium glutamicum
  MOD_RES (32): Ile, Thr, Lys, or Arg
  MOD_RES (35): Lys or Asn
  MOD_RES (36): His or Gln
  MOD_RES (60): His or Gln
  MOD_RES (61): Leu, Phe, Gly, or Arg
  MOD_RES (70): Val, Ala, Glu, or Gly
  MOD_RES (73): Val, Ala, Glu, or Gly
  MOD_RES (77): Val, Ala, Asp, or Gly
  MOD_RES (78): Val, Ala, Glu, or Gly
  MOD_RES (79): Asp, His, Asn, or Tyr
  MOD_RES (80): Ala, Phe, Ser, or Thr
  MOD_RES (81): Val, Ala, Glu, or Gly
  MOD_RES (84): Asp or Glu
  MOD_RES (90): Ala, Asp, Glu, Gly, or Val
  MOD_RES (91): Ile, Thr, Lys, or Arg
  MOD_RES (92): Phe, Ser, Tyr, or Cys
  MOD_RES (93): Cys, Phe, Leu, Trp, or Tyr
  MOD_RES (94)..(95): Variable amino acid
VEKPVEKTPEKPVEKPVEKQECEEKPDPDPEXMQXXEPVECEPTPKPETEPEPKPDTHAXXPGTPTPIPXARXLRIXXXXXQGXRGTDSXXXXXXESEECAPELNDVPEESDLIGQLIKGAIGIGIVVVGVGLLVNFLEQCVPVIEEVPVPEPEPIPEPAPQPEPTSVKPPESELDK

SEQ ID NO: 273 - DNA, 825 bp, Corynebacterium glutamicum
  CDS (101)..(802): RXN00515
gttgacgcactgaagaagtaaagtctcttcacaaaaagcgctgtgcttcctcacatggaagcacagcgctttttcatatttttattgccataatgggcacatgcgtttttctcgagttcttcccgcacttcttatcaccaccgccgtgagcatcccaacagcatctgctgccacactcaccgccgacaccgacaaggaattgtgcatcgccagcaacaccgacgattccgcggtggttaccttctggaactccattgaagactccgtgcgcgaacaacgcctcgacgaactagacgcccaagatccaggaatcaaagcggcgattgaaagctacatcgcccaagatgacaacgccccaactgctgctgaactgcaagtacgcctcgatgccatcgaatccggcgaaggcctagccatgctcctcccagacgatcccacgctggcagaccccaacgccgaggaaagtttcaaaacggagtacacatacgacgaagccaaagacatcatcagcggattctccagcgatccagccagcgatgtactcagccaacttcaacaagccgccaccaccggcacccgcaccgcagaaatccgcgccgaagtattcgccgaccgcaccgatgattacaacgaatcccaaaccgctcttaaagaggatttccaaaactgcatcgatgccatcgatgacgcccgcccaatcccactgcagtacatcctgattggaggcgccatcgctttggcggtcatcgtcctcgggatcagggcgtggactaactcaaggaagcagtccaagcacagccagtaatacgccaagcaaaaaattgc

SEQ ID NO: 274 - protein, 234 aa, Corynebacterium glutamicum
MRFSRVLPALLITTAVSIPTASAATLTADTDKELCIASNTDDSAVVTFWNSIEDSVREQRLDELDAQDPGIKAAIESYIAQDDNAPTAAELQVRLDAIESGEGLAMLLPDDPTLADPNAEESFKTEYTYDEAKDIISGFSSDPASDVLSQLQQAATTGTRTAEIRAEVFADRTDDYNESQTALKEDFQNCIDAIDDARPIPLQYILIGGAIALAVIVLGIRAWTNSRKQSKHSQ

SEQ ID NO: 275 - DNA, 503 bp, Corynebacterium glutamicum
  CDS (1)..(480): FRXA00515
attgaaagctacatcgcccaagatgacaacgccccaactgctgctgaactgcaagtacgcctcgatgccatcgaatccggcgaaggcctagccatgctcctcccagacgatcccacgctggcagaccccaacgccgaggaaagtttcaaaacggagtacacatacgacgaagccaaagacatcatcagcggattctccagcgatccagccagcgatgtactcagccaacttcaacaagccgccaccaccggcacccgcaccgcagaaatccgcgccgaagtattcgccgaccgcaccgatgattacaacgaatcccaaaccgctcttaaagaggatttccaaaactgcatcgatgccatcgatgacgcccgcccaatcccactgcagtacatcctgattggaggcgccatcgctttggcggtcatcgtcctcgggatcagggcgtggactaactcaaggaagcagtccaagcacagccagtaatacgccaagcaaaaaattgc

SEQ ID NO: 276 - protein, 160 aa, Corynebacterium glutamicum
IESYIAQDDNAPTAAELQVRLDAIESGEGLAMLLPDDPTLADPNAEESFKTEYTYDEAKDIISGFSSDPASDVLSQLQQAATTGTRTAEIRAEVFADRTDDYNESQTALKEDFQNCIDAIDDARPIPLQYILIGGAIALAVIVLGIRAWTNSRKQSKHSQ

SEQ ID NO: 277 - DNA, 298 bp, Corynebacterium glutamicum
  CDS (101)..(298): FRXA00520
gttgacgcactgaagaagtaaagtctcttcacaaaaagcgctgtgcttcctcacatggaagcacagcgctttttcatatttttattgccataatgggcacatgcgtttttctcgagttcttcccgcacttcttatcaccaccgccgtgagcatcccaacagcatctgctgccacactcaccggcgacaccgacaaggaattgtgcatcgccagcaacaccgacgattccgcggtggttaccttctggaactccattgaagactccgtgcgcgaacaacgcctcgacgaactagacgcc

SEQ ID NO: 278 - protein, 66 aa, Corynebacterium glutamicum
MRFSRVLPALLITTAVSIPTASAATLTGDTDKELCIASNTDDSAVVTFWNSIEDSVREQRLDELDA

SEQ ID NO: 279 - DNA, 1887 bp, Corynebacterium glutamicum
  CDS (101)..(1864): RXN00527
ttccttggccccgaagaaattaatcattgtggccgtggtcctgattttgatcattgcggctgcctcgttttattttctgcgttcatcatcgaatgaccaggtgattgccacttctgatgttcgggagatttcctccgagggaatcgtggcgcgtgtgtctgtcaacggaaatattgaagctgcgcgaaccaccaccatttacaccagtctgactgtgccggtcgcgaacttgccggttgcggttggtgaccgtgtggcagctgatcaggtgttggctgagttggatgcctctgccctgcaacgacagttggatgaaactgatgccaacaatgcgcgtgcagccatggcgaaccgcaattccatcgcgcagtcgcagcaagcatatgagcagtccagggaacttcttgatagtggtttgagcccggagatcaactcggcgcggtcctcgttgcgggcgtcctcacaggcatatcaggatgcgatccgcagttttgaagcgaagcagcgagatgtggatggcggattggattccaccatggtcgctcaatcggatgctctcaaggcagctcgtgagcaagcagatgctgctgaaattgaacgactgcgcgcggacttcggactgctcaacaacgatcgcagcaacctcaacgatgtcattggtctgctcgatgagagagaatctttggcttctgcggaatccgaactagctcaagcccgcgctgcaggtgacctagaggcagtcgctgcagctgaagcaaaggttgcaggcctggaacaatcaattgcttccaaaacctccacgtggcctagccaagatcagacttacttgcagtcctacaccgctttggaggaagctgagcgacgcgtcgcatccaccactgaagctctagaaatagccgagcggatctacattgattcactcggaaaagttgactcagaactagccgccgcacagcgcgccgttgccgaagcccactcagcacaacaagacgcagcacttggcctcgagaccgcgcagctttccacccaacaccaattggaagcccaatcaagcgccatcgatgcagctttaggtttggcatcagtagataatgaagccgccaccagatccacgtcccagctgcggatggatatcaacaacaccaccgttcgctccccatactcaggcattgtttcatccgtgcaggcagcccaaggtcaaccagcagccggcgcactgttgagtgttgctgatgattccgaactgaagatcaccgcgaatgtaaaagaagcggagatcagcaacgtcaccatcggatcccgcgtcaccttcactaccccatcgaccggaaccaaagaattcgccggccgagtatccaaagtctcccccattgcagctgccgccagtgccccagctacaggtgaaggagctgccgcaggcgccacaaccaccaacactgacgtcaccttccccatcgaaatttccgtcaccggcgaccgcgaaggcctcaacctcggcggatccgctcgagtacgcatcgtccatgaaatcgcaccacacgtactgaccgttcctttggaagctgtgtacaaaaatgatgacggcaaagacgctgttttgatcatcagcgacgacaacaaagtagaagaagtagaagtaaaaacagctgaatccgatgactttgatatcgcagtcagcggtgctggaatttcagaagacgctcgagtgctcacccagcctggaaactaccggggcctcatcggagaaactgtgaaacttcacgcagatacggtggagcaggcggcggctccttttagtcctgcggccccttttgaccctgcagcccctgccgtttctgccaagcaaaccgtgggccaggtgatttagcctatgagcctcatcgaaat

SEQ ID NO: 280 - protein, 588 aa, Corynebacterium glutamicum
VIATSDVREISSEGIVARVSVNGNIEAARTTTIYTSLTVPVANLPVAVGDRVAADQVLAELDASALQRQLDETDANNARAAMANRNSIAQSQQAYEQSRELLDSGLSPEINSARSSLRASSQAYQDAIRSFEAKQRDVDGGLDSTMVAQSDALKAAREQADAAEIERLRADFGLLNNDRSNLNDVIGLLDERESLASAESELAQARAAGDLEAVAAAEAKVAGLEQSIASKTSTWPSQDQTYLQSYTALEEAERRVASTTEALEIAERIYIDSLGKVDSELAAAQRAVAEAHSAQQDAALGLETAQLSTQHQLEAQSSAIDAALGLASVDNEAATRSTSQLRMDINNTTVRSPYSGIVSSVQAAQGQPAAGALLSVADDSELKITANVKEAEISNVTIGSRVTFTTPSTGTKEFAGRVSKVSPIAAAASAPATGEGAAAGATTTNTDVTFPIEISVTGDREGLNLGGSARVRIVHEIAPHVLTVPLEAVYKNDDGKDAVLIISDDNKVEEVEVKTAESDDFDIAVSGAGISEDARVLTQPGNYRGLIGETVKLHADTVEQAAAPFSPAAPFDPAAPAVSAKQTVGQVI

SEQ ID NO: 281 - DNA, 1887 bp, Corynebacterium glutamicum; identical to SEQ ID NO: 279
  CDS (101)..(1864): FRXA00527

SEQ ID NO: 282 - protein, 588 aa, Corynebacterium glutamicum; identical to SEQ ID NO: 280

SEQ ID NO: 283 - DNA, 1521 bp, Corynebacterium glutamicum
  CDS (101)..(1498): RXN00547
ggtcgtagcctaaacgaccttaaaaaggagccgaccgccgatggaccagaaattggaccagcagaaggtagaccgcgtatcgcccggtgatagtgaaccggtggcacgggattttatcaatgcaatcggcggtcggtttggtcgttttgcgcaggtgggcactcagcggttctggactcccctgcgtgttttgatcaccacttccctggtgtttttggccatggggtttttaacaaaagccaattgcatccagggttctagaggtactgatggtgtggtttctttgaactggtcgggaagtcgccagtacacctcagcctgttacaacgacatcgttccgctctatggggggcgcggaattgatgcgccaggtttcccttatgccttttcgtggcaggaaggtgatctcaccaggtacatggagtacccggtgttgggcggaattttccagtggatttgtggcattatcacgcggtttttgtacccggttgttgatgtcattccgtttcatacgctgcctgaatctggtctttatttcatcgtcaccgcgcttgcgttggcgttcttttgggtgttggtcatccgcatgatggtggagctcactggcaatcgagtgtgggataccgtccttgttgcggcgtctcccctggttgctgtgcatgcgtttaccaactgggatactccagccattgcggcggtgattggtgcgatgcttgcggtgaaacgcggaaaccccttggttgcgggtgtgctgatcggcgcgggtacggcgttcaaattgtggccgctttatcttcttggtgcgtatttggtgctggcggtcaagaataagaatctcaagccgtttatcaccatggctgcagcggctgcggtgacatggctcgtggtgaatgtgccagtgatgatcgcgtaccccaaggcgtggaatgaattcttgcgcctgaaccgggagcgtggtgcggagtggaccacgatttaccaggtcatcgaccgtaatttgccgatcaatttgaatgatccagtgctgcttaatgtgctgagcttcggcttgtttggtgcatcgtgtgtggccattttgatccttgggctcaaggtgcagcgcactccccgagtcgctgagctggcctttttgattgtcgcggcgtttttgctgtttaacaaggtgtggagtcctcagtattcactgtggctggtcccgttggctgttctggcatttcctcagtggaaagtgctgttcccgtggatggttacagacgccatggtgtggccaattttgatgtggcacatgctcggcacggacaacaagggactcccccatgaaatgttggatctcatcgtgatttcccgagatgccttcattgtggtcatgatagtaggtgtaatccggcagatgctcggacgacgtgcagatccggtgatggatgcgcacgccgggcgcgatttgttggccgggcccttcggcgcaggcgagcgtcgaaaagcattgaaggaagtaagttgagcacaacagttttgctggtc

SEQ ID NO: 284 - protein, 466 aa, Corynebacterium glutamicum
VARDFINAIGGRFGRFAQVGTQRFWTPLRVLITTSLVFLAMGFLTKANCIQGSRGTDGVVSLNWSGSRQYTSACYNDIVPLYGGRGIDAPGFPYAFSWQEGDLTRYMEYPVLGGIFQWICGIITRFLYPVVDVIPFHTLPESGLYFIVTALALAFFWVLVIRMMVELTGNRVWDTVLVAASPLVAVHAFTNWDTPAIAAVIGAMLAVKRGNPLVAGVLIGAGTAFKLWPLYLLGAYLVLAVKNKNLKPFITMAAAAAVTWLVVNVPVMIAYPKAWNEFLRLNRERGAEWTTIYQVIDRNLPINLNDPVLLNVLSFGLFGASCVAILILGLKVQRTPRVAELAFLIVAAFLLFNKVWSPQYSLWLVPLAVLAFPQWKVLFPWMVTDAMVWPILMWHMLGTDNKGLPHEMLDLIVISRDAFIVVMIVGVIRQMLGRRADPVMDAHAGRDLLAGPFGAGERRKALKEVS

SEQ ID NO: 285 - DNA, 514 bp, Corynebacterium glutamicum
  CDS (101)..(514): FRXA00547
accacgatttaccaggtcatcgaccgtaatttgccgatcaatttgaatgatccagtgctgcttaatgtgctgagcttcggcttgtttggtgcatcagtgtgtggccattttgatccttgggctcaaggtgcagcgcactccccgagtcgctgagctggcctttttgattgtcgcggcgtttttgctgtttaacaaggtgtggagtcctcagtattcactgtggctggtcccgttggctgttctggcatttcctcagtggaaagtgctgttcccgtggatggttacagacgccatggtgtggccaattttgatgtggcacatgctcggcacggacaacaagggactcccccatgaaatgttggatctcatcgtgatttcccgagatgccttcattgtggtcatgataagtaggtgtaatccggcagatgctcggacgacgtgcaaatccggtgatggatgcgcacgccgggcgcgaattgttggccgggcccttcggcgcaagcgaagcgtcgaa

SEQ ID NO: 286 - protein, 138 aa, Corynebacterium glutamicum
VAILILGLKVQRTPRVAELAFLIVAAFLLFNKVWSPQYSLWLVPLAVLAFPQWKVLFPWMVTDAMVWPILMWHMLGTDNKGLPHEMLDLIVISRDAFIVVMISRCNPADARTTCKSGDGCARRARIVGRALRRKRSVE

SEQ ID NO: 287 - DNA, 713 bp, Corynebacterium glutamicum
  CDS (1)..(690): FRXA00546
ccggtgttgggcggaattttccagtggatttgtggcattatcacgcggtttttgtacccggttgttgatgtcattccgtttcatacgctgcctgaatctggtctttatttcatcgtcaccgcgcttgcgttggcgttcttttgggtgttggtcatccgcatgatggtggagctcactggcaatcgagtgtgggataccgtccttgttgcggcgtctcccctggttgctgtgcatgcgtttaccaactgggatactccagccattgcggcggtgattggtgcgatgcttgcggtgaaacgcggaaaccccttggttgcgggtgtgctgatcggcgcgggtacggcgttcaaattgtggccgctttatcttcttggtgcgtatttggtgctggcggtcaagaataagaatctcaagccgtttatcaccatggctgcagcggctgcggtgacatggctcgtggtgaatgtgccagtgatgatcgcgtaccccaaggcgtggaatgaattcttgcgcctgaaccgggagcgtggtgcggagtggaccacgatttaccaggtcatcgaccgtaatttgccgatcaatttgaatgatccagtgctgcttaatgtgctgagcttcggcttgtttggtgcatcagtgtgtggccattttgatccttgggctcaaggtgcagcgcactccccgagtcgctgagctggcctttttgattgtcg

SEQ ID NO: 288 - protein, 230 aa, Corynebacterium glutamicum
PVLGGIFQWICGIITRFLYPVVDVIPFHTLPESGLYFIVTALALAFFWVLVIRMMVELTGNRVWDTVLVAASPLVAVHAFTNWDTPAIAAVIGAMLAVKRGNPLVAGVLIGAGTAFKLWPLYLLGAYLVLAVKNKNLKPFITMAAAAAVTWLVVNVPVMIAYPKAWNEFLRLNRERGAEWTTIYQVIDRNLPINLNDPVLLNVLSFGLFGASVCGHFDPWAQGAAHSPSR

SEQ ID NO: 289 - DNA, 1059 bp, Corynebacterium glutamicum
  CDS (101)..(1036): RXN00552
ccgccaacaaggcagcaaagctcgatccaattgacgccttgcgttatgagtaaaagcctcgtttttaaggtagccacacatcgcactagactgaagaactgtggctacctcaaaaattcttctttattacgcattcaccccgctctctgaccctaaagcggttcagctgtggcagcgtgagctctgcgagtcactgaatcttcgtggccgcatcctgatctccactcacggcatcaatggaaccgtgggcggagatattgatgattgcaaggcgtacattaaaaagacccgcgagtacccaggtttcaaccgcatgcagtttaagtggtccgagggtggcgctgaggatttcccaaagctcagtgtcaaagtccgcgatgagatcgttgccttcggcgctccagatgagctcaaagtggatgaaaacggcgtcgtcggtggcggcgttcacctgaaaccacagcaggtcaatgagcttgtggaagcccgtggcgatgaagttgtgttctttgacggccgcaacgcaatggaagcccagatcggcaagttcaaggacgctgttgtccctgacgtagaaaccactcatgatttcatcgcagaaattgagtctggaaaatacgacgatctcaaagacaagcctgtggtcacctactgcaccggcggaattcgttgtgagatcctgagttcactcatgatcaaccgtggtttcaaagaggtctaccaaatcgatggcggcatcgttcgctacggcgagcagtttggcaacaagggcctgtgggaaggctccctctacgttttcgataagcgcatgcatatggaattcggcgaggattacaaagaggtcggacactgcatccattgcgatactcccaccaacaaatttgagcactgcctcaacgaagatgattgccgcgagctcgtgttgatgtgccctgattgcttcgccaatgttgagacccgtcattgcaagcgcgaacgctgtgcagcaattgctgcggatttcgctgagcaaggaattgatccgctcgttacttcttaaaaagggtatggtggctgggt

SEQ ID NO: 290 - protein, 312 aa, Corynebacterium glutamicum
VATSKILLYYAFTPLSDPKAVQLWQRELCESLNLRGRILISTHGINGTVGGDIDDCKAYIKKTREYPGFNRMQFKWSEGGAEDFPKLSVKVRDEIVAFGAPDELKVDENGVVGGGVHLKPQQVNELVEARGDEVVFFDGRNAMEAQIGKFKDAVVPDVETTHDFIAEIESGKYDDLKDKPVVTYCTGGIRCEILSSLMINRGFKEVYQIDGGIVRYGEQFGNKGLWEGSLYVFDKRMHMEFGEDYKEVGHCIHCDTPTNKFEHCLNEDDCRELVLMCPDCFANVETRHCKRERCAAIAADFAEQGIDPLVTS

SEQ ID NO: 291 - DNA, 740 bp, Corynebacterium glutamicum
  CDS (1)..(717): FRXA00552
tttaagtggtccgagggtggcgctgaggatttcccaaagctcagtgtcaaagtccgcgatgagatcgttgccttcggcgctccagatgagctcaaagtggatgaaaacggcgtcgtcggtggcggcgttcacctgaaaccacagcaggtcaatgagcttgtggaagcccgtggcgatgaagttgtgttctttgacggccgcaacgcaatggaagcccagatcggcaagttcaaggacgctgttgtccctgacgtagaaaccactcatgatttcatcgcagaaattgagtctggaaaatacgacgatctcaaagacaagcctgtggtcacctactgcaccggcggaattcgttgtgagatcctgagttcactcatgatcaaccgtggtttcaaagaggtctaccaaatcgatggcggcatcgttcgctacggcgagcagtttggcaacaagggcctgtgggaaggctccctctacgttttcgataagcgcatgcatatggaattcggcgaggattacaaagaggtcggacactgcatccattgcgatactcccaccaacaaatttgagcactgcctcaacgaagatgattgccgcgagctcgtgttgatgtgccctgattgcttcgccaatgttgagacccgtcattgcaagcgcgaacgctgtgcagcaattgctgcggatttcgctgagcaaggaattgatccgctcgttacttcttaaaaagggtatggtggctgggt

SEQ ID NO: 292 - protein, 239 aa, Corynebacterium glutamicum
FKWSEGGAEDFPKLSVKVRDEIVAFGAPDELKVDENGVVGGGVHLKPQQVNELVEARGDEVVFFDGRNAMEAQIGKFKDAVVPDVETTHDFIAEIESGKYDDLKDKPVVTYCTGGIRCEILSSLMINRGFKEVYQIDGGIVRYGEQFGNKGLWEGSLYVFDKRMHMEFGEDYKEVGHCIHCDTPTNKFEHCLNEDDCRELVLMCPDCFANVETRHCKRERCAAIAADFAEQGIDPLVTS

SEQ ID NO: 293 - DNA, 1062 bp, Corynebacterium glutamicum
  CDS (101)..(1039): RXN00555
cctggtggatatcattactgagcttgcagaggtgtacggtagctggaaagagaccgacagcggttcttaacagttttctccatctcaactccggaatttgatgaaacaaccccttcgcgtacttatttcttgtcgacccgaagaaaattcgggtggcaaacgtagtgaacaaaatgatgctgtttttgagttcgccgcatggctagctcgtacttcagacatcaatgttcgtggaatcacaactttcatacgcccttggccgtcttcctccatcagtaagctcggaggaaaatatcataagtggtataagaatttagattcttactaccgcagtcgcacgatcaagggactcaaagaggccggagttgagaagtcccaatgggacgatgatgtttcagtttttgtagatggtccttctgaatccacgctgctcacccatgctgctgaagaattcgaagcggacctcattctgcttggctctgatgcgaccgcaccaaaaggccgctttctggccagctccaccgcagatgccctccttcactcctcgcccgtcccactaggacttgtgccgcgaggggtgaagctttccaaaaagggtgtcacccgcgtcaactacgctttcaccaatgaaagcgatgactttgagcaaggtttacgctcttccgcggagctcgccaccaattggaacgttcctcttcggatccttgctttttcacccacaggcattacttccgcaccaacgtcgcggagcttggatatttccactgagctttcctccgagtggcgtgaactaacgctcgccatgcttgatcgagcccgtgatggcgtcctcacagaccacccaaacttgagcgtgagcagtgaaaccggttctggctggggttggagcggtgcaattgatgctttgcgatggaagaaaggtgacctgctgtgcatgggaagccatcgcacagacaccctttcacgtgtctttgtcggttcggaaacaatggaaattatccgaaactctcctgtaccgaccatcatttatcccggtctttaggctctccaacagcagaggac

SEQ ID NO: 294 - protein, 313 aa, Corynebacterium glutamicum
MKQPLRVLISCRPEENSGGKRSEQNDAVFEFAAWLARTSDINVRGITTFIRPWPSSSISKLGGKYHKWYKNLDSYYRSRTIKGLKEAGVEKSQWDDDVSVFVDGPSESTLLTHAAEEFEADLILLGSDATAPKGRFLASSTADALLHSSPVPLGLVPRGVKLSKKGVTRVNYAFTNESDDFEQGLRSSAELATNWNVPLRILAFSPTGITSAPTSRSLDISTELSSEWRELTLAMLDRARDGVLTDHPNLSVSSETGSGWGWSGAIDALRWKKGDLLCMGSHRTDTLSRVFVGSETMEIIRNSPVPTIIYPGL

SEQ ID NO: 295 - DNA, 914 bp, Corynebacterium glutamicum
  CDS (1)..(891): FRXA00555
tcgggtggcaaacgtagtgaacaaaatgatgctgtttttgagttcgccgcatggctagctcgtacttcagacatcaatgttcgtggaatcacaactttcatacgcccttggccgtcttcctccatcagtaagctcggaggaaaatatcataagtggtataagaatttagattcttactaccgcagtcgcacgatcaagggactcaaagaggccggagttgagaagtcccaatgggacgatgatgtttcagtttttgtagatggtccttctgaatccacgctgctcacccatgctgctgaagaattcgaagcggacctcattctgcttggctctgatgcgaccgcaccaaaaggccgctttctggccagctccaccgcagatgccctccttcactcctcgcccgtcccactaggacttgtgccgcgaggggtgaagctttccaaaaagggtgtcacccgcgtcaactacgctttcaccaatgaaagcgatgactttgagcaaggtttacgctcttccgcggagctcgccaccaattggaacgttcctcttcggatccttgctttttcacccacaggcattacttccgcaccaacgtcgcggagcttggatatttccactgagctttcctccgagtggcgtgaactaacgctcgccatgcttgatcgagcccgtgatggcgtcctcacagaccacccaaacttgagcgtgagcagtgaaaccggttctggctggggttggagcggtgcaattgatgctttgcgatggaagaaaggtgacctgctgtgcatgggaagccatcgcacagacaccctttcacgtgtctttgtcggttcggaaacaatggaaattatccgaaactctcctgtaccgaccatcatttatcccggtctttaggctctccaacagcagaggac

SEQ ID NO: 296 - protein, 297 aa, Corynebacterium glutamicum
SGGKRSEQNDAVFEFAAWLARTSDINVRGITTFIRPWPSSSISKLGGKYHKWYKNLDSYYRSRTIKGLKEAGVEKSQWDDDVSVFVDGPSESTLLTHAAEEFEADLILLGSDATAPKGRFLASSTADALLHSSPVPLGLVPRGVKLSKKGVTRVNYAFTNESDDFEQGLRSSAELATNWNVPLRILAFSPTGITSAPTSRSLDISTELSSEWRELTLAMLDRARDGVLTDHPNLSVSSETGSGWGWSGAIDALRWKKGDLLCMGSHRTDTLSRVFVGSETMEIIRNSPVPTIIYPGL

SEQ ID NO: 297 - DNA, 498 bp, Corynebacterium glutamicum
  CDS (101)..(475): RXN00560
aaggacgacttctggggagcggtgtggattctcacggggattctcatgcggattatcagacatatggacactttaacggttcgtactaggctgatgcttcatgaggattgatccgctggaaacccggcaagccgtattggccgtcaaagactggattgaaggggagggagacgtcaaaaagcctggtcgtgcggcacttgccgccgcaactcgcctgagcgtccgactgctcgcgcaacacgcgccgggaaacagcgtggaggtgcgggtacccccatttgttgcggtgcaatgcatagaggggccaaaacatacacgcggcacaccacccaacgtggtggagaccgacgccaagacctggttacgcttagcacctgggcaaaccacatttgatgcagaatttgaaagcggaaaaattagcgcatcaggtacccgagccaaagagattgcggactggttaccagtggtcaaactttagatttcctaatgctcattagt

SEQ ID NO: 298 - protein, 125 aa, Corynebacterium glutamicum
MRIDPLETRQAVLAVKDWIEGEGDVKKPGRAALAAATRLSVRLLAQHAPGNSVEVRVPPFVAVQCIEGPKHTRGTPPNVVETDAKTWLRLAPGQTTFDAEFESGKISASGTRAKEIADWLPVVKL

SEQ ID NO: 299 - DNA, 337 bp, Corynebacterium glutamicum
  CDS (101)..(337): FRXA00560
aaggacgacttctggggagcggtgtggattctcacggggattctcatgcggattatcagacatatggacactttaacggttcgtactaggctgatgcttcatgaggattgatccgctggaaacccggcaagccgtattggccgtcaaagactggattgaaggggagggagacgtcaaaaagcctggtcgtgcggcacttgccgccgcaactcgcctgagcgtccgactgctcgcgcaacacgcgccgggaaacagcgtggaggtgcgggtacccccatttgttgcggtgcaatgcatagaggggccaaaacatacacgcggcacaccacccaacgtg

SEQ ID NO: 300 - protein, 79 aa, Corynebacterium glutamicum
MRIDPLETRQAVLAVKDWIEGEGDVKKPGRAALAAATRLSVRLLAQHAPGNSVEVRVPPFVAVQCIEGPKHTRGTPPNV

SEQ ID NO: 301 - DNA, 1002 bp, Corynebacterium glutamicum
  CDS (101)..(979): RXN00574
aactgctgggcactactgagattcccatgtgggatgtggaccggtggcaaccatcgcttctcaagcccggtgattcagttcgatttgtgcaggtgaagaaatgagcttcaaagtaatttccactggcccccaagccatcttccaagaccgaggtcgcttcggttttgccagcgctggtgttggaacctcaggatcctttgatcgtttatccgctgctcgcgcgaatcacgctttaggtaatgatcccaatgcaaccgtggtagagattctgctcggtggctttgaggtggaggcgttgcacaccacctcgatcgtgttcacgggaactgaagctgaagtgatggttcgaacggctggtggacaatccaaaaatgccaccaccaacaccatcatcgatgttgcagctggtgaacgtatccgcgtcgagcccgcaacctatggcatgcgtgcctactttgctgctcgcggtggatttgcagtaaaaaaaactttgggatctgcttcaaccgatctgatctcccacatgggcccttgcccgatcgagcccggggatgtcattgacgtagcaacagacattgcagattctcagtggtggccaaaacttcggcaactgcccaccttatggaaacgcatgccaacagaaacgcttaccgtcatccgaggtccacgtgacaaatggttcacgcaagaatccctcaacaacttttttactcaggtgtttacggtgagcaatgactccaaccggattggtttgcgcatgcactcaagcgagccgatccaacatcgtgtggaaggcgagctgaaaagtgaaggaatggtccgggggtccatccagattccgcctggtggaaaccccgtggtgtttggtcccgatcatcctgtgaccggtggctatccagtaatagcagtacttacatcaaggtcgtgtgatcgttcggcccagctgttgccgggcgataaagtcagatttaaattgctttaggaactttgagcttgctctgg

SEQ ID NO: 302 - protein, 293 aa, Corynebacterium glutamicum
MSFKVISTGPQAIFQDRGRFGFASAGVGTSGSFDRLSAARANHALGNDPNATVVEILLGGFEVEALHTTSIVFTGTEAEVMVRTAGGQSKNATTNTIIDVAAGERIRVEPATYGMRAYFAARGGFAVKKTLGSASTDLISHMGPCPIEPGDVIDVATDIADSQWWPKLRQLPTLWKRMPTETLTVIRGPRDKWFTQESLNNFFTQVFTVSNDSNRIGLRMHSSEPIQHRVEGELKSEGMVRGSIQIPPGGNPVVFGPDHPVTGGYPVIAVLTSRSCDRSAQLLPGDKVRFKLL

SEQ ID NO: 303 - DNA, 1002 bp, Corynebacterium glutamicum; identical to SEQ ID NO: 301
  CDS (101)..(979): FRXA00574

SEQ ID NO: 304 - protein, 293 aa, Corynebacterium glutamicum; identical to SEQ ID NO: 302

SEQ ID NO: 305 - DNA, 573 bp, Corynebacterium glutamicum
  CDS (101)..(550): RXN00589
ccgttatctccgtaactgttgtttctgcagaaccatacaactcagcaaaagccgcgacactccgcggcaaaaactaaccaaggatttaaaagtcttcaaaatgacaactctttcacgtaagttcttcgtttctgctaccacagccctggcggcagtcgcactggttgcgtgttcccctaatgagattgattctgaactgaaggtgccaacggcaactggcgtttctttaccttcgaagaacgtttccgcgacctcaactgctactacagatgaggatgcgcctggctacattgattgcgtagccgcaccaactcagcaacctgctgaaatctcactaaactgtgcaatggatattgatcggctcacggatatttcttggagcgaatgggatactgattccgcaactggaaccggtacccgcatcgtaaccgctgcaaatggtcaagagaccgaaaccgaagatattgaggtgaagctttccttccccaccgagtcttcccaaggcctagtgttcactcaggtcaccgtcgatggacaggttctcttcctctaatcctccataattagagagcg

SEQ ID NO: 306 - protein, 150 aa, Corynebacterium glutamicum
MTTLSRKFFVSATTALAAVALVACSPNEIDSELKVPTATGVSLPSKNVSATSTATTDEDAPGYIDCVAAPTQQPAEISLNCAMDIDRLTDISWSEWDTDSATGTGTRIVTAANGQETETEDIEVKLSFPTESSQGLVFTQVTVDGQVLFL

SEQ ID NO: 307 - DNA, 463 bp, Corynebacterium glutamicum
  CDS (101)..(463): FRXA00589
ccgttatctccgtaactgttgtttctgcagaaccatacaactcagcaaaagccgcgacactccgcggcaaaaactaaccaaggatttaaaagtcttcaaaatgacaactctttcacgtaagttcttcgtttctgctaccacagccctggcggcagtcgcactggttgcgtgttcccctaatgagattgattctgaactgaaggtgccaacggcaactggcgtttctttaccttcgaagaacgtttccgcgacctcaactgctactacagatgaggatgcgcctggctacattgattgcgtagccgcaccaactcagcaacctgctgaaatctcactaaactgtgcaatggatattgatcggctcacggatatttcttggagcgaatgggatactgattccgcaactggaaccggtacccgcatcgtaaccgctgcaaatggtcaagagaccgaaaccgaagat

SEQ ID NO: 308 - protein, 121 aa, Corynebacterium glutamicum
MTTLSRKFFVSATTALAAVALVACSPNEIDSELKVPTATGVSLPSKNVSATSTATTDEDAPGYIDCVAAPTQQPAEISLNCAMDIDRLTDISWSEWDTDSATGTGTRIVTAANGQETETED

SEQ ID NO: 309 - DNA, 468 bp, Corynebacterium glutamicum
  CDS (101)..(445): RXN00616
aaccgcaacctcgcgcacttggagtgaaaattctcatcttcatttcatcttggtgcctaacaatggaatacagattgagttgatcaaaggagaacccccaatgaaatcactcccccgtttcgccccactgattacgattctggctctgctcgtactcgttgccatcggaggatctgcactggcaaataatcgtgctacccctaatgtggaaagtgaacccgccacggtcaaccagcgttccactcccacaacttccgcgtatgagccccctgctacagaatctccggaagaaccaaccacacaaattcaagaatccccagtacaacccccagttcctgcccccgctcaaattcctcaagccccacaagttccactcaattatcagtactatgacgatgactgggacgacgacgatgatgacttcgacgacgactgggacgacgactaactaacccctgaggcactttc

SEQ ID NO: 310 - protein, 115 aa, Corynebacterium glutamicum
MKSLPRFAPLITILALLVLVAIGGSALANNRATPNVESEPATVNQRSTPTTSAYEPPATESPEEPTTQIQESPVQPPVPAPAQIPQAPQVPLNYQYYDDDWDDDDDDFDDDWDDD

SEQ ID NO: 311 - DNA, 468 bp, Corynebacterium glutamicum; identical to SEQ ID NO: 309
  CDS (101)..(445): FRXA00616

SEQ ID NO: 312 - protein, 115 aa, Corynebacterium glutamicum; identical to SEQ ID NO: 310

SEQ ID NO: 313 - DNA, 756 bp, Corynebacterium glutamicum
  CDS (101)..(733): RXN00647
tgcattcttcccacaatgacatgagcttattgcaacatcgtgggtaaagttgaatcgagaagtcgagaaataaccgaccgatgaaagagttgagacgataatgggcatcttcgaagccatccgagccgcacgcgcgaagaccaaagctgagatcaaagcagccgaggcaaaagtaaaaactgaggcgaaaaacaaagcaaagctagatctcaagcgcgagaagcttcttgtccagcaggaaaagaatctgctcaaggttgaagaaaagggcctgaagaagcgcaacaagcatgagctgaagatggccaaaaatatccttgagcaaaagcgccaaggacgcctaaacaaagacaaggtgaagcgctgggctggcaccgcacgtgtgctcactccactactgctgcctattatttatcgactctccaccgaagcacgcgatcaggttgttaagggacgtgcccgtcgtgcaggtgtcaccgcggagcagcttagccaattcgcaggtcacgcagcagcgctgaaggctcgtattcaaggtgttcgcgaaaccgcaaagaactccagcctccctgctggctttgtacgcgatgttgaagagcgtctcaatgagctcgaggctgctgcgaataactctgagttcatgtctccacagcagaggaaccgtgcgcaccagtcgatcagtcgtgatctgaaccaggtgtcagatcagattcaggatcgactactggacaagtagctgctggtcgagtcgctgcc

SEQ ID NO: 314 - protein, 211 aa, Corynebacterium glutamicum
MGIFEAIRAARAKTKAEIKAAEAKVKTEAKNKAKLDLKREKLLVQQEKNLLKVEEKGLKKRNKHELKMAKNILEQKRQGRLNKDKVKRWAGTARVLTPLLLPIIYRLSTEARDQVVKGRARRAGVTAEQLSQFAGHAAALKARIQGVRETAKNSSLPAGFVRDVEERLNELEAAANNSEFMSPQQRNRAHQSISRDLNQVSDQIQDRLLDK

SEQ ID NO: 315 - DNA, 756 bp, Corynebacterium glutamicum; identical to SEQ ID NO: 313
  CDS (101)..(733): FRXA00647

SEQ ID NO: 316 - protein, 211 aa, Corynebacterium glutamicum; identical to SEQ ID NO: 314

SEQ ID NO: 317 - DNA, 888 bp, Corynebacterium glutamicum
  CDS (101)..(865): RXN00653
gttgagattcgcctaacaaagattttggacgaaaacagtaacgatgacagccacgttaagcgcggaatcttctcgcaatggtaaaaagccgcggcctcgagtgagtgtttcccaggttgttggtgaaatcttgctcaccgtaggcattttggccttgttattcgcatactatgaggcctattggaccaacgtggaatctgggaaattacaagaatcggctggtcaaaagcttgatgaagactggaatgaagctcgggtgaatcctcgacaaaagctcaccccggaacttggtgaggcatttgcccggatgtatgttccagctttcggctctgacttcaacttcgcagtgattgaaggaaccgatgaggaagaccttcttgccggtcctggccgttatgtggattcccaaatgcctggtgaagccggaaactttgcagtggcaggccaccgagtgggcaagggtgcgccattcaatgatctaggaaacctggaagtctgcgatgcgatcgtggtggagacttacaattcctgggatgtgtaccgcgtgatgccgatgtccaccaacggtgcagatcgtgcagcagaagctgcggattgcttcaacgaaaaccaggtcagccgcatggctgaaggtgactatgtgaatgtgtccggacgaagcatcaccactccggatcgcatcgatgccacctaccccacaccgggcgtcttcgacactgcagtgcgtgaaggatcagaagctctgcttaccttgaccacgtgtcacccgcagttctccaacgctgagcgcatgattgtgcacgcaatgttggtggaagaaatcgataaatcaagtggcgaacgccctgcagctttggaggaaaactaaatgtattcacttctgtggca

SEQ ID NO: 318 - protein, 255 aa, Corynebacterium glutamicum
VSVSQVVGEILLTVGILALLFAYYEAYWTNVESGKLQESAGQKLDEDWNEARVNPRQKLTPELGEAFARMYVPAFGSDFNFAVIEGTDEEDLLAGPGRYVDSQMPGEAGNFAVAGHRVGKGAPFNDLGNLEVCDAIVVETYNSWDVYRVMPMSTNGADRAAEAADCFNENQVSRMAEGDYVNVSGRSITTPDRIDATYPTPGVFDTAVREGSEALLTLTTCHPQFSNAERMIVHAMLVEEIDKSSGERPAALEEN

SEQ ID NO: 319 - DNA, 888 bp, Corynebacterium glutamicum; identical to SEQ ID NO: 317
  CDS (101)..(865): FRXA00653

SEQ ID NO: 320 - protein, 255 aa, Corynebacterium glutamicum; identical to SEQ ID NO: 318

SEQ ID NO: 321 - DNA, 1392 bp, Corynebacterium glutamicum
  CDS (101)..(1369): RXN00662
ccctcatcatagttttaaatctggggcagaggcgggaatttaaacacctctgatacagcgtttactggctatagtgttgcgcgtgccaaatcgagttcctgtgtcaaccattccgctgaatcgtctagccgttatcgctgccatcattggtgtcggtaccgggctgtttgttgctgcactgaactggtctgccattggcgtggagcgtttagtttatggcgctgaccatttgcataattacaatccggtggccaatgtgtcgccacttcgcctgtccatcacggtgattgtgcttagcgtggtggcctcctgggcgtggttttttgtgcaccgcacggggccgaaagaggtttcgattgtgggtgcgatccggggcgagaagatgccgattttggagaccatagcgtccgcatttttgcaggtcaccacggttgctgcgggtgcgccggtgggtgcagagaacgctccacgtattgctggagccttggtgggagagcggtttagtcggtggttgcagctcgatattgatgcaaagcgcatcttggtggcctctgccgcgggagctggtttgggagcaagcttccaccttcccctagcaggcgtgctgtttgcccttgaggtcctactggttgaggcctccactcggaccgtggttatcgcaattatcaccacgaccgccgccgttgccaccactggatttttcgtgcaaaccccagatgtgttcagcactgtcccgctgacggaaagcccatggatgctgcttgccgcgatggtcaccggagtagtcgccggcatgtgcgggcactggttttcagcggcggcgcacaaaatggcgcaggcctcgcccaagggtgtgaagattttgtggcagatgccgttgggtttcgtggtgatcgctgcggtgatttatttcttccccgaaaccctggcgaatccccgttggcttgccgattccatgctcggcgatggcctgatcctcagcaccattttattggtacttgttctgcgcaccgccatgtttttgctcgccttccgcgtgggcatggtcggcggtaacctgatccccgcattcgcactcggatccatggtcggtggggtagtgggtgctgtattggaacccatcactaacgtcccgatcgccgcttttgcgctgcttggcgccgccgcatttttgtccaccaccatggcagcgccactgttcgggctcatcgccgcagtggaattcaccgacatggaagcccaaggctaccttccgattttcctcgcagtagcctccgcggtcctcgccgtgcgcgtgtggtctgtcatcgccaagcacgagctccgcgccatcccgatcacgtacgcgagctggacgggcgagcttaaataagcttgtcgacgcctccctcc

SEQ ID NO: 322 - protein, 423 aa, Corynebacterium glutamicum
VSTIPLNRLAVIAAIIGVGTGLFVAALNWSAIGVERLVYGADHLHNYNPVANVSPLRLSITVIVLSVVASWAWFFVHRTGPKEVSIVGAIRGEKMPILETIASAFLQVTTVAAGAPVGAENAPRIAGALVGERFSRWLQLDIDAKRILVASAAGAGLGASFHLPLAGVLFALEVLLVEASTRTVVIAIITTTAAVATTGFFVQTPDVFSTVPLTESPWMLLAAMVTGVVAGMCGHWFSAAAHKMAQASPKGVKILWQMPLGFVVIAAVIYFFPETLANPRWLADSMLGDGLILSTILLVLVLRTAMFLLAFRVGMVGGNLIPAFALGSMVGGVVGAVLEPITNVPIAAFALLGAAAFLSTTMAAPLFGLIAAVEFTDMEAQGYLPIFLAVASAVLAVRVWSVIAKHELRAIPITYASWTGELK

SEQ ID NO: 323 - DNA, 1392 bp, Corynebacterium glutamicum; identical to SEQ ID NO: 321
  CDS (101)..(1369): FRXA00662

SEQ ID NO: 324 - protein, 423 aa, Corynebacterium glutamicum; identical to SEQ ID NO: 322

SEQ ID NO: 325 - DNA, 1038 bp, Corynebacterium glutamicum
  CDS (101)..(1015): RXN00666
agtggtgaatgctggataagtttttaacatgtctagtgtagtcggggaaggcccaaaaccacgattgagcgtgcttgatctcgtcgcgctgagtgaagggatgacggccggcgaggccattgcacacagtgttcgcgctgcgcagatcgccgaagagcacaattatgcgcgtttctgggtggcggagcaccacaactcggaaggcttggcatcttccgcgacgacgctgctcatgggtcatattgcaggccacacttcacgcattcgcgttggctccggtggcatcatgatgcccaaccactccgcgctgcacgtcgccgaagaactcggcacccttgaggccatttaccccggccgcatcgaggccggcctagggcgcgcaccaggaaccgaccccatgacggcgcgggaattgggtcgggcaagttcgcttgtcgacgacgtcctctccacaatcgtctccctccagaattatttggacacccccgaagaacgcccgaacatcatcgcgcatccaggaataaattcccgtgtgccgctattcatgctgggatcttccctcaacggcgctgcgatggccgctaaattagaccttccattcgccttcgccagccacttcgcacccttccaaatggggcccgccatcgcctcctatcgcgaactagcagccaatccttatgtcatggccgcagcgaatgtcctggtgtgcgacaccgaggaagaagccgaattccagatctccacactgcaccaaatgttcgccggaatcgtgacgaactcccgcggcaaacttgccccaccagtgcggaatctgaaagacaaactcgacccgatgatctggaaacacatcgaagattcattggaaatgactttcatcggaacagccgaatcagtggtattacaactgcaggaattcgctgatcgctacaagttagatgagatcattacagtcacctactcctacgaccccgaagtcaggttccgctccatagctgcacttggcacggcatggaattagtgtcaaaagcctcaaaaata

SEQ ID NO: 326 - protein, 305 aa, Corynebacterium glutamicum
MTAGEAIAHSVRAAQIAEEHNYARFWVAEHHNSEGLASSATTLLMGHIAGHTSRIRVGSGGIMMPNHSALHVAEELGTLEAIYPGRIEAGLGRAPGTDPMTARELGRASSLVDDVLSTIVSLQNYLDTPEERPNIIAHPGINSRVPLFMLGSSLNGAAMAAKLDLPFAFASHFAPFQMGPAIASYRELAANPYVMAAANVLVCDTEEEAEFQISTLHQMFAGIVTNSRGKLAPPVRNLKDKLDPMIWKHIEDSLEMTFIGTAESVVLQLQEFADRYKLDEIITVTYSYDPEVRFRSIAALGTAWN

SEQ ID NO: 327 - DNA, 487 bp, Corynebacterium glutamicum
  CDS (101)..(487): FRXA00666
agtggtgaatgctggataagtttttaacatgtctagtgtagtcggggaaggcccaaaaccacgattgagcgtgcttgatctcgtcgcgctgagtgaagggatgacggccggcgaggccattgcacacagtgttcgcgctgcgcagatcgccgaagagcacaattatgcgcgtttctgggtggcggagcaccacaactcggaaggcttggcatcttccgcgacgacgctgctcatgggtcatattgcaggccacacttcacgcattcgcgttggctccggtggcatcatgatgcccaaccactccgcgctgcacgtcgccgaagaactcggcacccttgaggccatttaccccggccgcatcgaggccggcctagggcgcgcaccaggaaccgaccccatgacggcgcgggaattgggtcgggcaagttcgcttgtcgacgacgtcctctccacaatcgtctccctccagaattatttggacaccccc

SEQ ID NO: 328 - protein, 129 aa, Corynebacterium glutamicum
MTAGEAIAHSVRAAQIAEEHNYARFWVAEHHNSEGLASSATTLLMGHIAGHTSRIRVGSGGIMMPNHSALHVAEELGTLEAIYPGRIEAGLGRAPGTDPMTARELGRASSLVDDVLSTIVSLQNYLDTP

SEQ ID NO: 329 - DNA, 750 bp, Corynebacterium glutamicum
  CDS (101)..(727): RXN00704
tcaaattctgcgcacaaagtgttctaagacgacgtctgcccatcggcgctctaatgcacattacagcgtttacagaattgaaaatgaaaggttcaaagccttgaccattacttttagccgcgttgctctgaccaccctggcagtcaccgcaaccactttgtccctgagcactgctgcgaatgcacagtcttccttgttggataagactcttgatgcccgtcagtgcatcgatgcagacaacgtctgggtctcagttgactatggtgcagattccgaaaaagaaccagagggcgcatgtgccaccgagttcactgatggtgttgtagctcttgaatctgctgggttcaaactgacctttgacgaatctgaaatgggcaaatacatgaccggtatcaacggagttgttcctgattgggttgaaactggaacttactggagttactactctggtgaagtcgcagatgattacagcgtggactacacctactacgaggttggtgcatctaattctgaacctgaaggtggaactgttgaggcttgggttgttggcaccggcgaggaaacaccagcactcgagactcttcctgaaactccagcagcaaccggatcttctgaagacggcggctggattgcagtcatcgcaggtcttctcgcactgatcggtggtggagttgcagctttgtaccagggcttgatcactatcccaggtctggttctgcctaagttttaagcaacctaacctaaagcttc

SEQ ID NO: 330 - protein, 209 aa, Corynebacterium glutamicum
LTITFSRVALTTLAVTATTLSLSTAANAQSSLLDKTLDARQCIDADNVWVSVDYGADSEKEPEGACATEFTDGVVALESAGFKLTFDESEMGKYMTGINGVVPDWVETGTYWSYYSGEVADDYSVDYTYYEVGASNSEPEGGTVEAWVVGTGEETPALETLPETPAATGSSEDGGWIAVIAGLLALIGGGVAALYQGLITIPGLVLPKF

SEQ ID NO: 331 - DNA, 636 bp, Corynebacterium glutamicum
  CDS (101)..(613): FRXA00704
tcaaattctgcgcacaaagtgttctaagacgacgtctgcccatcggcgctctaatgcacattacagcgtttacagaattgaaaatgaaaggttcaaagccttgaccattacttttagccgcgttgctctgaccaccctggcagtcaccgcaaccactttgtccctgagcactgctgcgaatgcacagtcttccttgttggataagactcttgatgcccgtcagtgcatcgatgcagacaacgtctgggtctcagttgactatggtgcagattccgaaaaagaaccagagggcgcatgtgccaccgagttcactgatggtgttgtagctcttgaatctgctgggttcaaactgacctttgacgaatctgaaatgggcaaatacatgaccggtatcaacggagttgttcctgattgggttgaaactggaacttactggagttactactctggtgaagtcgcagatgattacagcgtggactacacctactacgaggttggtgcatctaattctgaacctgaaggtggaactgttgaggcttgggttgttggcaccggcgaggaaacaccagcactcgagactctttctgaaacttcagcagcaaccggatcttcttaagacggcggctggattgcagt

SEQ ID NO: 332 - protein, 171 aa, Corynebacterium glutamicum
LTITFSRVALTTLAVTATTLSLSTAANAQSSLLDKTLDARQCIDADNVWVSVDYGADSEKEPEGACATEFTDGVVALESAGFKLTFDESEMGKYMTGINGVVPDWVETGTYWSYYSGEVADDYSVDYTYYEVGASNSEPEGGTVEAWVVGTGEETPALETLSETSAATGSS

SEQ ID NO: 333 - DNA, 819 bp, Corynebacterium glutamicum
  CDS (101)..(796): RXN00712
tgttgcgcgttaataaggaacaatatcggtgtgattcgcgatatattaatcagcttgttttcccagcataagtagtcgcctagtttaggaggtacatggcatgtccctacgcaagaatctcgccctcggaagcagcacagtactactcacagccgtgctaagcgggtgtgtttcccttgatgagcgctccactgatacatccacggagaatgtcaccacggtaactgccacactcacttccaccgccgcagcagaacccaccactagaacgactgtgcaaagtgctacagaagcctccactactgcaccagtgcaatgcaatttggatccccgtacctcggattttgggccatatcttgcacaatctcgcaccccggttggtgagctagctggatctgcagattccgtcgtgcaggttcctgactggttctatcacttccaaatgggcgacaacggctacgattcctgttccaagctcagctatgtggttctcaacggttccaatggagacgccgaacgttctactggaacgggtgctgcgatcgccgacgtggtggtgctgtttatcgacggccatatggttgctcgtcctgctccttttgaaatgaagaccgtggaatccgtcaccagagtgtcagattcagaaatccaagttgtttacggacatgccggccgatctactgccgaaggtgttacggactatttcacctttaacttcttcgttgacaacggcgttctttcaggacgcggcgatctcccagaacacatcgatactcacatgcgtctatatctgctgtagccccatctaaaaactcttga

SEQ ID NO: 334 - protein, 232 aa, Corynebacterium glutamicum
MSLRKNLALGSSTVLLTAVLSGCVSLDERSTDTSTENVTTVTATLTSTAAAEPTTRTTVQSATEASTTAPVQCNLDPRTSDFGPYLAQSRTPVGELAGSADSVVQVPDWFYHFQMGDNGYDSCSKLSYVVLNGSNGDAERSTGTGAAIADVVVLFIDGHMVARPAPFEMKTVESVTRVSDSEIQVVYGHAGRSTAEGVTDYFTFNFFVDNGVLSGRGDLPEHIDTHMRLYLL

SEQ ID NO: 335 - DNA, 572 bp, Corynebacterium glutamicum
  CDS (1)..(549): FRXA00712
gcagcagaacccaccactagaacgactgtgcaaagtgctacagaagcctccactactgcaccagtgcaatgcaatttggatccccgtacctcggattttgggccatatcttgcacaatctcgcaccccggttggtgagctagctggatctgcagattccgtcgtgcaggttcctgactggttctatcacttccaaatgggcgacaacggctacgattcctgttccaagctcagctatgtggttctcaacggttccaatggagacgccgaacgttctactggaacgggtgctgcgatcgccgacgtggtggtgctgtttatcgacggccatatggttgctcgtcctgctccttttgaaatgaagaccgtggaatccgtcaccagagtgtcagattcagaaatccaagttgtttacggacatgccggccgatctactgccgaaggtgttacggactatttcacctttaacttcttcgttgacaacggcgttctttcaggacgcggcgatctcccagaacacatcgatactcacatgcgtctatatctgctgtagccccatctaaaaactcttga

SEQ ID NO: 336 - protein, 183 aa, Corynebacterium glutamicum
AAEPTTRTTVQSATEASTTAPVQCNLDPRTSDFGPYLAQSRTPVGELAGSADSVVQVPDWFYHFQMGDNGYDSCSKLSYVVLNGSNGDAERSTGTGAAIADVVVLFIDGHMVARPAPFEMKTVESVTRVSDSEIQVVYGHAGRSTAEGVTDYFTFNFFVDNGVLSGRGDLPEHIDTHMRLYLL

SEQ ID NO: 337 - DNA, 789 bp, Corynebacterium glutamicum
  CDS (101)..(766): RXN00720
ctgatctatacgtcctgttgaagtagagaagctttctggtcaagttccttgagtatggtggtcgaagaccagcactccagattcaaggaacttataaaacatggcatcaccgcgccgcccacaggttgcagcaccacgcatcaaagaacttcgcctaacaggccttgacaacgctgaccctcaagacatcgaatcgaatgagcagatagagtcatgccgttttaacgaggccgagctttccgaacgcgatctttctggtgctggtttcattgaatgtgaattccttgggctggaagcacacgaaaccgagctacgccgggctcaattcgtggaaacacgcatcgaaagagccaatgctccatcttttaaggcagcccgctccatctggcgcaacgcaacgatttccgactcccgctttggtgccgtcgaaatgtatgaagcaaccgtccaagctttgaaaatctctgattctaagctgtcgtttgtcaatctgcggggtgcatcgttacgggatgtgctctttgagaactgtgtcatcgacgagcttgatcttggccaagccagagcagaacgcatcgcttttaaagactgcacggtgcattcgctcacctttgatcatgccgtgctcagcaatgtggatcttcgcggtttagatatcgagcgcatcagtggcgtggagtccatgtccggaaccgtgatctcatccctgcaggctgctgacctgtcgggagcatttgcacggcatttaggaattactgtaaacgattagaaatccgctcttttgaacaa

SEQ ID NO: 338 - protein, 222 aa, Corynebacterium glutamicum
MASPRRPQVAAPRIKELRLTGLDNADPQDIESNEQIESCRFNEAELSERDLSGAGFIECEFLGLEAHETELRRAQFVETRIERANAPSFKAARSIWRNATISDSRFGAVEMYEATVQALKISDSKLSFVNLRGASLRDVLFENCVIDELDLGQARAERIAFKDCTVHSLTFDHAVLSNVDLRGLDIERISGVESMSGTVISSLQAADLSGAFARHLGITVND

SEQ ID NO: 339 - DNA, 789 bp, Corynebacterium glutamicum; identical to SEQ ID NO: 337
  CDS (101)..(766): FRXA00720

SEQ ID NO: 340 - protein, 222 aa, Corynebacterium glutamicum; identical to SEQ ID NO: 338

SEQ ID NO: 341 - DNA, 1088 bp, Corynebacterium glutamicum
  CDS (1)..(1065): RXN00722
gctgttctccgagaagccggagttgttgatgccgggggacagggcctagttattctcctggagtccctggccgaacaaatcaacggaaacccacctcaccatccatcgcaccacagtgaaccagccgaagaaccctccttccacggcaaaaccggcgacctagaagtgatgttttacattgcatgcgactccgcgcaaacactcgatgctctccacaacgaacttgaaacactaggcgacagcctgctcatcgcccgagaaaccaatacccgcggcaccgttcacatccattcgcgccgggcaggcgaggtcatccaaaaagcatttgccgcaggagacgtcagcgaactccgccttgaaatcctccccgatacttccggcagcttcacggaagaaccacgccgggtcctcatggctgtcgcacctgacggcctggtggcggagctgtaccgcagcgctggagtgaaggtggtggcccgcaacatcgcgcaatccaagtctgatgatgtggtggcaaagatcgtttccatcgcgcgcaagtctggtgccgatgaggtgatcttgctgcccaacggtcttttgaccaagcgtgagctggtttccattgagcgttccagccatgcttttgagcaaagtgtggttattttgcctactgccacgttggttgcaggtcttgcagcggtgtccgttcatgagccagcgcaacccctggcggtggattcctatgccatggcagaggccgccggttccatgcgcacggccacgatccgcgccgccaccagcgccgcgctcacccaggccggcgcatgctccaagggtgatctattaagcttcatcggcccggagatagctctggtctccgaggagctcaacgacgcgctatcgcgcaccgctttaaggcttctcgacggctccagcgagcaaattacccttctcatagcgcaagaccgtcagtccgccttcgacgaagatgttttccgccgtggcctgggaactcacacggatgtggagatcacggtctatcctgctactggaatggagaatctggtagagatcggagtggagtagccacatgttgggttggcatg

SEQ ID NO: 342 - protein, 355 aa, Corynebacterium glutamicum
AVLREAGVVDAGGQGLVILLESLAEQINGNPPHHPSHHSEPAEEPSFHGKTGDLEVMFYIACDSAQTLDALHNELETLGDSLLIARETNTRGTVHIHSRRAGEVIQKAFAAGDVSELRLEILPDTSGSFTEEPRRVLMAVAPDGLVAELYRSAGVKVVARNIAQSKSDDVVAKIVSIARKSGADEVILLPNGLLTKRELVSIERSSHAFEQSVVILPTATLVAGLAAVSVHEPAQPLAVDSYAMAEAAGSMRTATIRAATSAALTQAGACSKGDLLSFIGPEIALVSEELNDALSRTALRLLDGSSEQITLLIAQDRQSAFDEDVFRRGLGTHTDVEITVYPATGMENLVEIGVE

SEQ ID NO: 343 - DNA, 542 bp, Corynebacterium glutamicum
  CDS (16)..(519): FRXA00722
ccccccccggtgatcttgctgcccaacggtcttttgaccaagcgtgagctggtttccattgagcgttccagccatgcttttgagcaaagtgtggttattttgcctactgccacgttggttgcaggtcttgcagcggtgtccgttcatgagccagcgcaacccctggcggtggattcctatgccatggcagaggccgccggttccatgcgcacggccacgatccgcgccgccaccagcgccgcgctcacccaggccggcgcatgctccaagggtgatctattaagcttcatcggcccggagatagctctggtctccgaggagctcaacgacgcgctatcgcgcaccgctttaaggcttctcgacggctccagcgagcaaattacccttctcatagcgcaagaccgtcagtccgccttcgacgaagatgttttccgccgtggcctgggaactcacacggatgtggagatcacggtctatcctgctactggaatggagaatctggtagagatcggagtggagtagccacatgttgggttggcatg

SEQ ID NO: 344 - protein, 168 aa, Corynebacterium glutamicum
LLPNGLLTKRELVSIERSSHAFEQSVVILPTATLVAGLAAVSVHEPAQPLAVDSYAMAEAAGSMRTATIRAATSAALTQAGACSKGDLLSFIGPEIALVSEELNDALSRTALRLLDGSSEQITLLIAQDRQSAFDEDVFRRGLGTHTDVEITVYPATGMENLVEIGVE

SEQ ID NO: 345 - DNA, 1101 bp, Corynebacterium glutamicum
  CDS (101)..(1078): RXN00729
ttcagcacagatcaccctttgccagctaccgacttagtttcgtaacacgtatagtgggaggcgttttgccagacgccaaagaaagataattggattacctatgagcgccaccaaccctgatgccctagacgtgcagcacgtctatcccatcaagacgaaaaagactccacttgcggtgattttcaacatcattagcggtggtttgattggaatggcggagttggtgccaggaatttccggcggaactgtcgctttggttcttggaatttatgagcgcgcactgcacaacggtgatctcctcattgatctgatcaaggtgttgatcaaggaccgctcgaaggttaaggaagctgcggcgaaaatcgactggtggttcctcggcgctatcggcgttggcatggtcgtgatggtcttctcgatgtcatcgattttgcatacagttgttgaggactacccagagatcactcgcggtctgttccttggaatggttgccgtgtctatccttgttccgttgggaatgatggatatgcgggatgccaagaagcgcctcgcaatcgtcatcccgctatttataatctgcgccatgctgggattctttggaacatccttcactagtgcgcctcgcaccgatccttcactgatctttgtcttcatctgtgctgcgatcgctgtgtgtgctcttgttcttcctggtgtttcaggatcattcttcttgctggcggtcggtatgtacgcgccaatcatggaatctctgtccaaccgtgacttgtcggtcatcggcgtgttcttgcttggcgcgctcaccggtgtgatcttgtttgtgaaggttttgtcttatgttctcgagcaccaccgcaccatcacgctgaccatcatggctggtctcatgctgggttcacttcgtgcgctgtggccttggcaggacggtgacgctaatctacttgctcctggcgataacgccgtgatgattttcagcatcatcattcttggtggcgcgattgtcgctgctttgatgtttgctgagcgtgtgtcttccaagaacattgattctgagaccgtggcagaagagcacccgcgctaaataagaactccacaaagaaa

SEQ ID NO: 346 - protein, 326 aa, Corynebacterium glutamicum
MSATNPDALDVQHVYPIKTKKTPLAVIFNIISGGLIGMAELVPGISGGTVALVLGIYERALHNGDLLIDLIKVLIKDRSKVKEAAAKIDWWFLGAIGVGMVVMVFSMSSILHTVVEDYPEITRGLFLGMVAVSILVPLGMMDMRDAKKRLAIVIPLFIICAMLGFFGTSFTSAPRTDPSLIFVFICAAIAVCALVLPGVSGSFFLLAVGMYAPIMESLSNRDLSVIGVFLLGALTGVILFVKVLSYVLEHHRTITLTIMAGLMLGSLRALWPWQDGDANLLAPGDNAVMIFSIIILGGAIVAALMFAERVSSKNIDSETVAEEHPR

SEQ ID NO: 347 - DNA, 665 bp, Corynebacterium glutamicum
  CDS (1)..(642): FRXA00729
acagttgttgaggactaccaagagttcactcgcggtctgttccttggaatggttgccgtgtctatccttgttccgttgggaatgatggatatgcgggatgccaagaagcgcctcgcaatcgtcatcccgctatttataatctgcgccatgctgggattctttggaacatccttcactagtgcgcctcgcaccgatccttcactgatctttgtcttcatctgtgctgcgatcgctgtgtgtgctcttgttcttcctggtgtttcaggatcattcttcttgctggcggtcggtatgtacgcgccaatcatggaatctctgtccaaccgtgacttgtcggtcatcggcgtgttcttgcttggcgcgctcaccggtgtgatcttgtttgtgaaggttttgtcttatgttctcgagcaccaccgcaccatcacgctgaccatcatggctggtctcatgctgggttcacttcgtgcgctgtggccttggcaggacggtgacgctaatctacttgctcctggcgataacgccgtgatgattttcagcatcatcattcttggtggcgcgattgtcgctgctttgatgtttgctgagcgtgtgtcttccaagaacattgattctgagaccgtggcagaagagcacccgcgctaaataagaactccacaaagaaa

SEQ ID NO: 348 - protein, 214 aa, Corynebacterium glutamicum
TVVEDYQEFTRGLFLGMVAVSILVPLGMMDMRDAKKRLAIVIPLFIICAMLGFFGTSFTSAPRTDPSLIFVFICAAIAVCALVLPGVSGSFFLLAVGMYAPIMESLSNRDLSVIGVFLLGALTGVILFVKVLSYVLEHHRTITLTIMAGLMLGSLRALWPWQDGDANLLAPGDNAVMIFSIIILGGAIVAALMFAERVSSKNIDSETVAEEHPR

SEQ ID NO: 349 - DNA, 706 bp, Corynebacterium glutamicum
  CDS (101)..(706): FRXA02867
ttcagcacagatcaccctttgccagctaccgacttagtttcgtaacacgtatagtgggaggcgttttgccagacgccaaagaaagataattggattacctatgagcgccaccaaccctgatgccctagacgtgcagcacgtctatcccatcaagacgaaaaagactccacttgcggtgattttcaacatcattagcggtggtttgattggaatggcggagttggtgccaggaatttccggcggaactgtcgctttggttcttggaatttatgagcgcgcactgcacaacggtgatctcctcattgatctgatcaaggtgttgatcaaggaccgctcgaaggttaaggaagctgcggcgaaaatcgactggtggttcctcggcgctatcggcgttggcatggtcgtgatggtcttctcgatgtcatcgattttgcatacagttgttgaggactacccagagatcactcgcggtctgttccttggaatggttgccgtgtctatccttgttccgttgggaatgatggatatgcgggatgccaagaagcgcctcgcaatcgtcatcccgctatttataatctgcgccatgctgggattctttggaacatccttcactagtgcgcctcgcaccgatccttcactgatctttgtcttcatctgtgctgcgatcgctgtgtgtgctcttgttcttcctggtgttcaggatcac

SEQ ID NO: 350 - protein, 202 aa, Corynebacterium glutamicum
MSATNPDALDVQHVYPIKTKKTPLAVIFNIISGGLIGMAELVPGISGGTVALVLGIYERALHNGDLLIDLIKVLIKDRSKVKEAAAKIDWWFLGAIGVGMVVMVFSMSSILHTVVEDYPEITRGLFLGMVAVSILVPLGMMDMRDAKKRLAIVIPLFIICAMLGFFGTSFTSAPRTDPSLIFVFICAAIAVCALVLPGVQDH

SEQ ID NO: 351 - DNA, 930 bp, Corynebacterium glutamicum
  CDS (101)..(907): RXN00730
tggtgcaataaccttaagtgaggctggattttgcgttggcaggcgctcgggttttgttttatccggcatgggctcgggagggactttaaaataaacagctatgtcgagccaacaaacgatcttcatcattttgctctttgccgcagtgattctcatttccatagtaatgattacagctgccttcaaaacccggaaaaagcgctttgccgcgcgggctgaaggaatggccaaccctacaattcctgcgccaactgtgccgtggcagcgcttcgccggagcacttgcagccttgtacgctaggcctgaatggcacaagacccgcggagcgaaacgagtgtactcagctgaacagacttattttgggtttgtctcagcaatgccactggggatggtgcaaaacatgctgcaaacagactggggtgtgaaaaagtctgagcatgcagttgatcagctttctaaaggagtggaagtgatcgttggggtagccgcaggcaactggcgtaaaaacggagtatcacccgcacaagtggaagaggcaggccagcggttagcagctgaaggattggctcatccacactttgttgtattccaaaagcagcttcaacaggcagatccaaatgcagaatatgatctcgatgtgctcgcatttgatatcgcacgcgtagccaacctccttcgctgggctgcttatacagatctgttgctccctgcagaagcccgttggttccaagaccagctgggaattgcggctgctgtgtcctttgggagctgggaagaatacggagagcgatacgtccgtggactacagaagaacttcaagggcggaaacaagccatatatcgaaggagaacgctggctcaacactgaggctgaaagtccatggaagacccaaaagtggattagcgcctaactgctcatgagctaagcggc

SEQ ID NO: 352 - protein, 269 aa, Corynebacterium glutamicum
MSSQQTIFIILLFAAVILISIVMITAAFKTRKKRFAARAEGMANPTIPAPTVPWQRFAGALAALYARPEWHKTRGAKRVYSAEQTYFGFVSAMPLGMVQNMLQTDWGVKKSEHAVDQLSKGVEVIVGVAAGNWRKNGVSPAQVEEAGQRLAAEGLAHPHFVVFQKQLQQADPNAEYDLDVLAFDIARVANLLRWAAYTDLLLPAEARWFQDQLGIAAAVSFGSWEEYGERYVRGLQKNFKGGNKPYIEGERWLNTEAESPWKTQKWISA

SEQ ID NO: 353 - DNA, 356 bp, Corynebacterium glutamicum
  CDS (1)..(333): FRXA00730
cactttgttgtattccaaaagcagcttcaacaggcagatccaaatgcagaatatgatctcgatgtgctcgcatttgatatcgcacgcgtagccaacctccttcgctgggctgcttatacagatctgttgctccctgcagaagcccgttggttccaagaccagctgggaattgcggctgctgtgtcctttgggagctgggaagaatacggagagcgatacgtccgtggactacagaagaacttcaagggcggaaacaagccatatatcgaaggagaacgctggctcaacactgaggctgaaagtccatggaagacccaaaagtggattagcgcctaactgctcatgagctaagcggc

SEQ ID NO: 354 - protein, 111 aa, Corynebacterium glutamicum
HFVVFQKQLQQADPNAEYDLDVLAFDIARVANLLRWAAYTDLLLPAEARWFQDQLGIAAAVSFGSWEEYGERYVRGLQKNFKGGNKPYIEGERWLNTEAESPWKTQKWISA

SEQ ID NO: 355 - DNA, 2619 bp, Corynebacterium glutamicum
  CDS (101)..(2596): RXN00731
ttgataccgtggccggtggacattccttccaggtgtggcgcgtggctttagcgaatacttttgattgggttgccaagcgcggcggattgcaggtttaacaatgaaagacgcttcacagtcctacttattattcggtctgagatggctgggcaggtccctgcgtttcgcaccgttaagcctgctcatgatcgttgtcatgcggggtttgagggaagtgtttggcgccgaagatcccgcaaatagctctttggtagacaaccttgggctcaccctgccgtggtctcttaatgatccgcattttctcaccgcagggtttagcgcttccaccaccacagcagcgctcatgtccacgttgtggatcatcgtgtttgcggtgccctctgaacggattctgggcagcctcaaattcgcgatcacagcagcgcttatccacatcacttccattccgctgggcatcggcatcgcccacctcatcgaagaagccgatctcaaccgctggggcaacaacatgttggccgatgtgctgctcaccccagatttctgggtcttcggcgtcgccgctttcgcatccgcctccatgccactgctctggcgacggcgcacccgattgttcctctttactatcaccttgacgctgctgctttatacgggcacgcttgccgacgtcaccatgctcaccgcgaccatcatcggcaccgttgccggcgagttgaacaggcatcggaaaaccccaggtggccgctggcttcccggttccctcaccgtgcgtgaagcgcgcattatgacggccattttggtcactgccgtagcagcaggtccagtgcttgctgcgcttaatccactcacccacggccctttttccagtgcaacgaaattgatctggcagccccttgtcactgaagaacacatgcatcacctctgccacacagacagcacctctgatgcatgccaaggtgcgcttgatcagctccaacagcacggtgttggcccttccgttgccaacctgattccactgatcctcaccgtggtccttgcgatggggcttagccgcggacgtcgacttgcatggattttggcggttttggcccagctcatttccatcgcagtgttgatgttccagctgaccaaactatcggctgattccaccgatcttctatggtcagtcaatgcctttagcgtgatcgttccttggctggtggcgctcgccgtcttggtgttttcccgccgtgcattccaggtgaagattgataccacccggatttctaaatccttaggcgctctcatggttacatggttggcaacggcagcattgtggatccttgccacattgttcctgccacacgcattccacccacatccaacattggggctggctttcaaagaactccccttccgctatctcccaccaactatcgaaacggtgttaagccatcaactcttccccagaagccctgctgggtgggcagtgtttgaatggactggaacgctattctggctggtcgtagcagcaactctttatcatctgctcatgggtgtgcccagcaacaaagcgcacgaggaccaagaaaacgcagcgactctcctgcgctctggcagcggcgatcacttgtcctggatgaccatttggggtggcaatacgtattggtgggcaccagaaaatgcaggatatgtggcctaccgcgtgaaaaggggcatcgcaattacattgggtgagcctattctgggtccggattcatccgtctctaaagcagagctggccgcacagtttgaagaatttgccagcaaccaaggctggattgttgcgtggtattccgtttgtgaagaattctcaaaggaacgcatcaacgctggccaccacacacttcgtgtggctgaggaagcagtcttaagctcagctaatgcggatttcaaaggtaagcacttccaaaatgtccgcaccgcccgaaaccgcgcggccaaagagggcgtaagttccatctggacaacctgggctgatttgagtgccgaaatgcagcacaagatcatcacgctgtcggaagaatgggtctctgataaagctctgccggagatgggcttcacgcttggcactgtcaacgagctctcagatccagatacctatcttcttctcgcgattgatgaggaagagcatctgcacggtgtgaccagttggttgccggtctatgaaaaaggacgcatcgtcggctacacacttgatgtgatgcgccgtgatccgcaaggctttaaatctgtcatcgagtttctcatttccgaggccgtcgttatcgcaagggatcacgatctggaatggatgtcgatgtccggcgctcctttgagtacgcccccaggtgtggccgacgacggcaccatcggacaaattttggagcttttgggccgagcaatggagccgttctacggtttccgttccctcgctgcgtccaagaacaaattccacccagaacaccacggttggtacttgtgttaccgcgatgaattatcgttaccaagcattggccttgccgttgctgcctgctacctcaacgagtttccgctgccgaattggctgaaaaagaccgccacttccgccccaagccacagctagaaaaacgcgtaaccttggtg

SEQ ID NO: 356 - protein, 832 aa, Corynebacterium glutamicum
MKDASQSYLLFGLRWLGRSLRFAPLSLLMIVVMRGLREVFGAEDPANSSLVDNLGLTLPWSLNDPHFLTAGFSASTTTAALMSTLWIIVFAVPSERILGSLKFAITAALIHITSIPLGIGIAHLIEEADLNRWGNNMLADVLLTPDFWVFGVAAFASASMPLLWRRRTRLFLFTITLTLLLYTGTLADVTMLTATIIGTVAGELNRHRKTPGGRWLPGSLTVREARIMTAILVTAVAAGPVLAALNPLTHGPFSSATKLIWQPLVTEEHMHHLCHTDSTSDACQGALDQLQQHGVGPSVANLIPLILTVVLAMGLSRGRRLAWILAVLAQLISIAVLMFQLTKLSADSTDLLWSVNAFSVIVPWLVALAVLVFSRRAFQVKIDTTRISKSLGALMVTWLATAALWILATLFLPHAFHPHPTLGLAFKELPFRYLPPTIETVLSHQLFPRSPAGWAVFEWTGTLFWLVVAATLYHLLMGVPSNKAHEDQENAATLLRSGSGDHLSWMTIWGGNTYWWAPENAGYVAYRVKRGIAITLGEPILGPDSSVSKAELAAQFEEFASNQGWIVAWYSVCEEFSKERINAGHHTLRVAEEAVLSSANADFKGKHFQNVRTARNRAAKEGVSSIWTTWADLSAEMQHKIITLSEEWVSDKALPEMGFTLGTVNELSDPDTYLLLAIDEEEHLHGVTSWLPVYEKGRIVGYTLDVMRRDPQGFKSVIEFLISEAVVIARDHDLEWMSMSGAPLSTPPGVADDGTIGQILELLGRAMEPFYGFRSLAASKNKFHPEHHGWYLCYRDELSLPSIGLAVAACYLNEFPLPNWLKKTATSAPSHS

SEQ ID NO: 357 - DNA, 2495 bp, Corynebacterium glutamicum
  CDS (1)..(2472): FRXA00731
ttattattcggtctgagatggctgggcaggtccctgcgtttcgcaccgttaagcctgctcatgatcgttgtcatgcggggtttgagggaagtgtttggcgccgaagatcccgcaaatagctctttggtagacaaccttgggctcaccctgccgtggtctcttaatgatccgcattttctcaccgcagggtttagcgcttccaccaccacagcagcgctcatgtccacgttgtggatcatcgtgtttgcggtgccctctgaacggattctgggcagcctcaaattcgcgatcacagcagcgcttatccacatcacttccattccgctgggcatcggcatcgcccacctcatcgaagaagccgatctcaaccgctggggcaacaacatgttggccgatgtgctgctcaccccagatttctgggtcttcggcgtcgccgctttcgcatccgcctccatgccactgctctggcgacggcgcacccgattgttcctctttactatcaccttgacgctgctgctttatacgggcacgcttgccgacgtcaccatgctcaccgcgaccatcatcggcaccgttgccggcgagttgaacaggcatcggaaaaccccaggtggccgctggcttcccggttccctcaccgtgcgtgaagcgcgcattatgacggccattttggtcactgccgtagcagcaggtccagtgcttgctgcgcttaatccactcacccacggccctttttccagtgcaacgaaattgatctggcagccccttgtcactgaagaacacatgcatcacctctgccacacagacagcacctctgatgcatgccaaggtgcgcttgatcagctccaacagcacggtgttggcccttccgttgccaacctgattccactgatcctcaccgtggtccttgcgatggggcttagccgcggacgtcgacttgcatggattttggcggttttggcccagctcatttccatcgcagtgttgatgttccagctgaccaaactatcggctgattccaccgatcttctatggtcagtcaatgcctttagcgtgatcgttccttggctggtggcgctcgccgtcttggtgttttcccgccgtgcattccaggtgaagattgataccacccggatttctaaatccttaggcgctctcatggttacatggttggcaacggcagcattgtggatccttgccacattgttcctgccacacgcattccacccacatccaacattggggctggctttcaaagaactccccttccgctatctcccaccaactatcgaaacggtgttaagccatcaactcttccccagaagccctgctgggtgggcagtgtttgaatggactggaacgctattctggctggtcgtagcagcaactctttatcatctgctcatgggtgtgcccagcaacaaagcgcacgaggaccaagaaaacgcagcgactctcctgcgctctggcagcggcgatcacttgtcctggatgaccatttggggtggcaatacgtattggtgggcaccagaaaatgcaggatatgtggcctaccgcgtgaaaaggggcatcgcaattacattgggtgagcctattctgggtccggattcatccgtctctaaagcagagctggccgcacagtttgaagaatttgccagcaaccaaggctggattgttgcgtggtattccgtttgtgaagaattctcaaaggaacgcatcaacgctggccaccacacacttcgtgtggctgaggaagcagtcttaagctcagctaatgcggatttcaaaggtaagcacttccaaaatgtccgcaccgcccgaaaccgcgcggccaaagagggcgtaagttccatctggacaacctgggctgatttgagtgccgaaatgcagcacaagatcatcacgctgtcggaagaatgggtctctgataaagctctgccggagatgggcttcacgcttggcactgtcaacgagctctcagatccagatacctatcttcttctcgcgattgatgaggaagagcatctgcacggtgtgaccagttggttgccggtctatgaaaaaggacgcatcgtcggctacacacttgatgtgatgcgccgtgatccgcaaggctttaaatctgtcatcgagtttctcatttccgaggccgtcgttatcgcaagggatcacgatctggaatggatgtcgatgtccggcgctcctttgagtacgcccccaggtgtggccgacgacggcaccatcggacaaattttggagcttttgggccgagcaatggagccgttctacggtttccgttccctcgctgcgtccaagaacaaattccacccagaacaccacggttggtacttgtgttaccgcgatgaattatcgttaccaagcattggccttgccgttgctgcctgctacctcaacgagtttccgctgccgaattggctgaaaaagaccgccacttccgccccaagccacagctagaaaaacgcgtaaccttggtg

SEQ ID NO: 358 - protein, 824 aa, Corynebacterium glutamicum
LLFGLRWLGRSLRFAPLSLLMIVVMRGLREVFGAEDPANSSLVDNLGLTLPWSLNDPHFLTAGFSASTTTAALMSTLWIIVFAVPSERILGSLKFAITAALIHITSIPLGIGIAHLIEEADLNRWGNNMLADVLLTPDFWVFGVAAFASASMPLLWRRRTRLFLFTITLTLLLYTGTLADVTMLTATIIGTVAGELNRHRKTPGGRWLPGSLTVREARIMTAILVTAVAAGPVLAALNPLTHGPFSSATKLIWQPLVTEEHMHHLCHTDSTSDACQGALDQLQQHGVGPSVANLIPLILTVVLAMGLSRGRRLAWILAVLAQLISIAVLMFQLTKLSADSTDLLWSVNAFSVIVPWLVALAVLVFSRRAFQVKIDTTRISKSLGALMVTWLATAALWILATLFLPHAFHPHPTLGLAFKELPFRYLPPTIETVLSHQLFPRSPAGWAVFEWTGTLFWLVVAATLYHLLMGVPSNKAHEDQENAATLLRSGSGDHLSWMTIWGGNTYWWAPENAGYVAYRVKRGIAITLGEPILGPDSSVSKAELAAQFEEFASNQGWIVAWYSVCEEFSKERINAGHHTLRVAEEAVLSSANADFKGKHFQNVRTARNRAAKEGVSSIWTTWADLSAEMQHKIITLSEEWVSDKALPEMGFTLGTVNELSDPDTYLLLAIDEEEHLHGVTSWLPVYEKGRIVGYTLDVMRRDPQGFKSVIEFLISEAVVIARDHDLEWMSMSGAPLSTPPGVADDGTIGQILELLGRAMEPFYGFRSLAASKNKFHPEHHGWYLCYRDELSLPSIGLAVAACYLNEFPLPNWLKKTATSAPSHS

SEQ ID NO: 359 - DNA, 386 bp, Corynebacterium glutamicum
  CDS (1)..(363): RXN00738
tgtcaagaggagacggatggcttttttgattttgggcgcgatatgcggcccggtgagcgccggtcgtatggcactttgcttaacgacgccacgacgcaggtgtcgcacatcctcggcaatgccttcacccgatctgggctcaacgctgagtacgcgaatctttatggtcaggcgttggtgggcatggtgtcgatgacggcgcaatggtggttggatgagcgcactccgccgaaggaagaagttgccgcacatattgttaatctttgttggaatggtttgacggggatggaagccgatccgaagttaactcccatcagttctgctgagggtgcgatttttggtcaagaaaaggagagtgaagcgtgacacctatgctcgcggggctg

SEQ ID NO: 360 - protein, 121 aa, Corynebacterium glutamicum
CQEETDGFFDFGRDMRPGERRSYGTLLNDATTQVSHILGNAFTRSGLNAEYANLYGQALVGMVSMTAQWWLDERTPPKEEVAAHIVNLCWNGLTGMEADPKLTPISSAEGAIFGQEKESEA

SEQ ID NO: 361 - DNA, 388 bp, Corynebacterium glutamicum
  CDS (78)..(365): FRXA00738
catgcccctattagacggatggcttttttgattttgggcgcgatatgcggcccggtgagcgccggtcgtatggcactttgcttaacgacgccacgacgcaggtgtcgcacatcctcggcaatgccttcacccgatctgggctcaacgctgagtacgcgaatctttatggtcaggcgttggtgggcatggtgtcgatgacggcgcaatggtggttggatgagcgcactccgccgaaggaagaagttgccgcacatattgttaatctttgttggaatggtttgacggggatggaagccgatccgaagttaactcccatcagttctgctgagggtgcgatttttggtcaagaaaaggagagtgaagcgtgacacctatgctcgcggggctg

SEQ ID NO: 362 - protein, 96 aa, Corynebacterium glutamicum
LLNDATTQVSHILGNAFTRSGLNAEYANLYGQALVGMVSMTAQWWLDERTPPKEEVAAHIVNLCWNGLTGMEADPKLTPISSAEGAIFGQEKESEA

SEQ ID NO: 363 - DNA, 561 bp, Corynebacterium glutamicum
  CDS (101)..(538): RXN00750
tttaaacaaaagcgataacaatgaaccgatggtgtctacgacagaaccgactcccccacccactaacaccccaccagaaaataacacctcgaccgaacctatggactggtcgatcattattaatgtgcttgccgttgctactgtcgtgatactcacccttatcatcgcagctgcattatataggggtttcacacgcaacaaaataaaaaaacttgaagctatacgagaagcccagcaacacgaacgcgacaatcccactatccgcattgctgatcttcgcggcatcatggatactcaccactacatctacaccgacgtcatggttacacgtgcacatgaactcatgattactgcacccgcattctttgatgtcactctccccgaagcagtgctctacgaagatactaaacgtgctgctcatgatgcccttaacggctataaagacaccactgtcgctagtgcagagaagatcatgcttgtagatgcagtcaccgcagcatggactctctattccacaaaagcaaacaccggatccacgtgatccgagagccgagtaccgct

SEQ ID NO: 364 - protein, 146 aa, Corynebacterium glutamicum
MDWSIIINVLAVATVVILTLIIAAALYRGFTRNKIKKLEAIREAQQHERDNPTIRIADLRGIMDTHHYIYTDVMVTRAHELMITAPAFFDVTLPEAVLYEDTKRAAHDALNGYKDTTVASAEKIMLVDAVTAAWTLYSTKANTGST

SEQ ID NO: 365 - DNA, 561 bp, Corynebacterium glutamicum; identical to SEQ ID NO: 363
  CDS (101)..(538): FRXA00750

SEQ ID NO: 366 - protein, 146 aa, Corynebacterium glutamicum; identical to SEQ ID NO: 364

SEQ ID NO: 367 - DNA, 999 bp, Corynebacterium glutamicum
  CDS (101)..(976): RXN00762
gatgctgcgatggtcacaagtcgttttctggatttttccacatctatatctttaccccacgttcctgcaagagattcaaacttggggctaacctggggacatgaatacttccgatcgtattaaaagcactcaaatcgcgctggatcgtgacctccgtgagcaggcactattgcttttgaaggaggttcgcgcagttgatggcgtggatgctttatcagaacaatttgtccgtgggcttgcagaacccggacttgttcactcccatttaatagtcacgctcaatagcgagctggttggcctcgcggccgcggatgaggaaaccacggaactggctgtccacccggcgcacaggcgtcagggaatcggtaaggcgcttatcgacgccgcccccacctcatcaatctgggcgcatggaaatacagcaggtgcacaagcgttggcatccaccctgcgtatgaagaagactcgcgagcttctggtgatggagatttccgacagggcgctcgatgactctgcagcatacaaagatccagatggaattacacacagtagtttggcgaatgcccctgtggagaaatcagtagctgaggctaaatggcttcaatccaacaacgaagcattcgactggcatcccgagcagggcggatggacaactcatcggttggcgcaggctcagaaagccgattggtacaaggactctgacgtgttattcctctgggacggcgaagagatcgttggcttccactgggtaaagcagcacagtccagaattacaagagatttacgtagttggcctttcttcagcctaccgtggtcgcggcttgggagatccgcttgttcgcctcggactgcatcacatgagggctcatggtgctcgaaaagtgattctttatgtggaagctggcaacactccggcagtcgcggcatacgaaaaactgggattcactgtcgcggaaagccacgtagtttacgaaaagtaaaaaagagacttgctaaaaac

SEQ ID NO: 368 - protein, 292 aa, Corynebacterium glutamicum
MNTSDRIKSTQIALDRDLREQALLLLKEVRAVDGVDALSEQFVRGLAEPGLVHSHLIVTLNSELVGLAAADEETTELAVHPAHRRQGIGKALIDAAPTSSIWAHGNTAGAQALASTLRMKKTRELLVMEISDRALDDSAAYKDPDGITHSSLANAPVEKSVAEAKWLQSNNEAFDWHPEQGGWTTHRLAQAQKADWYKDSDVLFLWDGEEIVGFHWVKQHSPELQEIYVVGLSSAYRGRGLGDPLVRLGLHHMRAHGARKVILYVEAGNTPAVAAYEKLGFTVAESHVVYEK

SEQ ID NO: 369 - DNA, 1242 bp, Corynebacterium glutamicum
  CDS (101)..(1219): RXN00768
tcaagcgccataacgcctgattatgcacggttaaggcgcatctcgctcactggtgctaaccacttgcgcttttggaaggaataacccttcctgtcagattgtgggtactatcgaagacgtggctaacgaacaaatcgaggtcgcgaacaacactgatcagattcctgcaggatacaagtcccctcttctttctagaagtggtgcggcagaagcgcagggcgctgctgctcaagcaggtactgaaggtgtcgcgtggcattacggttcccctctcgtcgagcaacgcatcttcgaaactggcacgggcttagttgaccgttctaatcgcaaggtgatcaaagtcgaagggcctgatgcccccacgttcctcaataatattttgtcccaaaaggttgattccgttgaaaacggctttactgccggtgccctggatttggatgcgcagggtcgtattcaacacacaatgcaggtaactgtcgtcgatggggttttctacctcgacacgtccgcggcggagtttgataccctcatcggtttcttgaccaagatgattttctggtcggaagtcaccgtccaggaagccgatctggcgatcatcactctgctcggccaggaaattgcccttccggacgcggtctttgcccgtagggtcgattggaatgggccatcgcgtatcgacgtcgccatccggcgtgaaaacctggaggagggcgtcgacaagctcttagaagctggcgcaaagctcaccggtctcatggcttacacggccgagcgcgtgaaggcgttggagcccgctgcgggcgtggatttggatgataagaccattccccatgaaatcccccattggattggccgtggcgaacatttaggcgctgtgcatttgaccaagggttgctaccgcgggcaggaaactgtcgcgcgcgttgataatcttgggcgttccccgcgcgtgctggttctgcttcatcttgacggttccgcaccgctggatcctgtgactggcgctgaaatcaaggccggtgcgcgcaccgttggtcgtctgggcaccgttgtccatgacgccgattacgggccgatcgctctcgggctggttaagcgcagcgctttggataaagaacttcacatcgatgatgtctctgtaaacgtcgaccgcgatctgcttcctgcggaggaaagtgaacaacgcggacgcgcagcgatcaataagctcaagggtctttaactaaaacgatttatagcgaa

SEQ ID NO: 370 - protein, 373 aa, Corynebacterium glutamicum
VGTIEDVANEQIEVANNTDQIPAGYKSPLLSRSGAAEAQGAAAQAGTEGVAWHYGSPLVEQRIFETGTGLVDRSNRKVIKVEGPDAPTFLNNILSQKVDSVENGFTAGALDLDAQGRIQHTMQVTVVDGVFYLDTSAAEFDTLIGFLTKMIFWSEVTVQEADLAIITLLGQEIALPDAVFARRVDWNGPSRIDVAIRRENLEEGVDKLLEAGAKLTGLMAYTAERVKALEPAAGVDLDDKTIPHEIPHWIGRGEHLGAVHLTKGCYRGQETVARVDNLGRSPRVLVLLHLDGSAPLDPVTGAEIKAGARTVGRLGTVVHDADYGPIALGLVKRSALDKELHIDDVSVNVDRDLLPAEESEQRGRAAINKLKGL

SEQ ID NO: 371 - DNA, 567 bp, Corynebacterium glutamicum
  CDS (101)..(544): FRXA00768
gacgtcgccatccggcgtgaaaacctggaggagggcgtcgacaagctcttagaagctggcgcaaagctcaccggtctcatggcttacacggcccgagcgcgtgaaggcgttggagcccgctgcgggcgtggatttggatgataagaccattccccatgaaatcccccattggattggccgtggcgaacatttaggcgctgtgcatttgaccaagggttgctaccgcgggcaggaaactgtcgcgcgcgttgataatcttgggcgttccccgcgcgtgctggttctgcttcatcttgacggttccgcaccgctggatcctgtgactggcgctgaaatcaaggccggtgcgcgcaccgttggtcgtctgggcaccgttgtccatgacgccgattacgggccgatcgctctcgggctggttaagcgcagcgctttggataaagaacttcacatcgatgatgtctctgtaaacgtcgaccgcgatctgcttcctgcggaggaaagtgaacaacgcggacgcgcagcgatcaataagctcaagggtctttaactaaaacgatttatagcgaa

SEQ ID NO: 372 - protein, 148 aa, Corynebacterium glutamicum
VKALEPAAGVDLDDKTIPHEIPHWIGRGEHLGAVHLTKGCYRGQETVARVDNLGRSPRVLVLLHLDGSAPLDPVTGAEIKAGARTVGRLGTVVHDADYGPIALGLVKRSALDKELHIDDVSVNVDRDLLPAEESEQRGRAAINKLKGL

SEQ ID NO: 373 - DNA, 837 bp, Corynebacterium glutamicum
  CDS (101)..(814): FRXA00767
tcaagcgccataacgcctgattatgcacggttaaggcgcatctcgctcactggtgctaaccacttgcgcttttggaaggaataacccttcctgtcagattgtgggtactatcgaagacgtggctaacgaacaaatcgaggtcgcgaacaacactgatcagattcctgcaggatacaagtcccctcttctttctagaagtggtgcggcagaagcgcagggcgctgctgctcaagcaggtactgaaggtgtcgcgtggcattacggttcccctctcgtcgagcaacgcatcttcgaaactggcacgggcttagttgaccgttctaatcgcaaggtgatcaaagtcgaagggcctgatgcccccacgttcctcaataatattttgtcccaaaaggttgattccgttgaaaacggctttactgccggtgccctggatttggatgcgcagggtcgtattcaacacacaatgcaggtaactgtcgtcgatggggttttctacctcgacacgtccgcggcggagtttgataccctcatcggtttcttgaccaagatgattttctggtcggaagtcaccgtccaggaagccgatctggcgatcatcactctgctcggccaggaaattgcccttccggacgcggtctttgcccgtagggtcgattggaatgggccatcgcgtatcgacgtcgccatccggcgtgaaaacctggaggagggcgtcgacaagctcttagaagctggcgcaaagctcaccggtctcatggcttacacggcccgagcgcgtgaaggcgttggagcccgctgcgggcgtggatttggatgataagaccattccccatgaaa

SEQ ID NO: 374 - protein, 238 aa, Corynebacterium glutamicum
VGTIEDVANEQIEVANNTDQIPAGYKSPLLSRSGAAEAQGAAAQAGTEGVAWHYGSPLVEQRIFETGTGLVDRSNRKVIKVEGPDAPTFLNNILSQKVDSVENGFTAGALDLDAQGRIQHTMQVTVVDGVFYLDTSAAEFDTLIGFLTKMIFWSEVTVQEADLAIITLLGQEIALPDAVFARRVDWNGPSRIDVAIRRENLEEGVDKLLEAGAKLTGLMAYTARAREGVGARCGRGFG

SEQ ID NO: 375 - DNA, 336 bp, Corynebacterium glutamicum
  CDS (101)..(313): RXN00769
ggctattgtgtctatcaggaatacagttaatacatcttgaaaagcccatgggccatccgaattcccaggatcggcccgctcactccaagggggtcaggcaatgggtcgcggtcgcgcgaaggcaaaacagaccaaagttgctcgccagttgaagtacagctctccagacatggatctcgattcgctgcagcgggagctggctaaccagtctcctaggcgttcctactccgatacccctgatgatgaggaccagtacgcagagtatgcggactgggatgaggacgacaccgacaatcgtgcctacggcacaaactgatttcgtgtgtccttaactct

SEQ ID NO: 376 - protein, 71 aa, Corynebacterium glutamicum
MGRGRAKAKQTKVARQLKYSSPDMDLDSLQRELANQSPRRSYSDTPDDEDQYAEYADWDEDDTDNRAYGTN

SEQ ID NO: 377 - DNA, 336 bp, Corynebacterium glutamicum; identical to SEQ ID NO: 375
  CDS (101)..(313): FRXA00769

SEQ ID NO: 378 - protein, 71 aa, Corynebacterium glutamicum; identical to SEQ ID NO: 376

SEQ ID NO: 379 - DNA, 942 bp, Corynebacterium glutamicum
  CDS (101)..(919): RXN00771
tacccctgttttggagaatgctccgagccaggggtacttttcttttcctcacacacagtagctgctgagaaaaatgaagaccttttgttaggttgggagtatgaccaacccatacgaggccttcataccgctcaagcatcgtacggggattgaacccgagcacaccttttgggaatgggaaaacaaaagggttcacattgcaaggagacgtcgagaagcgcccgtccgcgttatcgtggtgcatgggctaggcacccatagtggcgccctctggcccctcgtcgcggccattgagggcgcggacctcgccgcgatcgacctgcctaaaactccgctttacgacgattggctgcgccttttagaatctttcatctcgtccgaagacgacggtcggccactcatcctgatcggtgcaggcaccggaggcttgctttgcgcagaagctgcacaccgcacaggactggtcgcacacgtcattgccacctgcctgctcaacccctccgaccagccgacgcgccgggcactgttcaggttttcaccgctgactcggttgatccaaggccgcttgcgcaaccgcgaaattcccgtgaccagagtgttgaacttcagcaaaatcagccgcagcccagccctgagcaaattgtgcgcggccgatgaatttagcggagcatccaaaataacctggggtttcctcgcgtcatatgtgcaacacaaggccaaactgggtgcagttcccgtcactctgatgcaccctgaccacgaccttctgactcccgttgagctcagtctgcgtacgctttcgcgcctcaaagcgcccactgacgtggttatgctcaaggactgcgggcattttcccatcgaagaacccggcttcaccaccatgctcgaaaccgtcacatcagttatcgcgcggaatagttagcgggcgcatgtggttgggat

SEQ ID NO: 380 - protein, 273 aa, Corynebacterium glutamicum
MTNPYEAFIPLKHRTGIEPEHTFWEWENKRVHIARRRREAPVRVIVVHGLGTHSGALWPLVAAIEGADLAAIDLPKTPLYDDWLRLLESFISSEDDGRPLILIGAGTGGLLCAEAAHRTGLVAHVIATCLLNPSDQPTRRALFRFSPLTRLIQGRLRNREIPVTRVLNFSKISRSPALSKLCAADEFSGASKITWGFLASYVQHKAKLGAVPVTLMHPDHDLLTPVELSLRTLSRLKAPTDVVMLKDCGHFPIEEPGFTTMLETVTSVIARNS

SEQ ID NO: 381 - DNA, 801 bp, Corynebacterium glutamicum
  CDS (101)..(778): FRXA00771
tacccctgttttggagaatgctccgagccaggggtacttttcttttcctcacacacagtagctgctgagaaaaatgaagaccttttgttaggttgggagtatgaccaacccatacgaggccttcataccgctcaagcatcgtacggggattgaacccgagcacaccttttgggaatgggaaaacaaaagggttcacattgcaaggagacgtcgagaagcgcccgtccgcgttatcgtggtgcatgggctaggcacccatagtggcgccctctggcccctcgtcgcggccattgagggcgcggacctcgccgcgatcgacctgcctaaaactccgctttacgacgattggctgcgccttttagaatctttcatctcgtccgaagacgacggtcggccactcatcctgatcggtgcaggcaccggaggcttgctttgcgcagaagctgcacaccgcacaggactggtcgcacacgtcattgccacctgcctgctcaacccctccgaccagccgacgcgccgggcactgttcaggttttcaccgctgactcggttgatccaaggccgcttgcgcaaccgcgaaattcccgtgaccagagtgttgaacttcagcaaaatcagccgcagcccagccctgagcaaattgtgcgcggccgatgaatttaacggagcattcaaaataacctggggtttcctcgcgtcatatgtgcaacacaaggccaaactgggtgcagttcccctcactctgatgcaccctgaccacgacctttttgactcccgttgagctcaaatctgcgtacgctt

SEQ ID NO: 382 - protein, 226 aa, Corynebacterium glutamicum
MTNPYEAFIPLKHRTGIEPEHTFWEWENKRVHIARRRREAPVRVIVVHGLGTHSGALWPLVAAIEGADLAAIDLPKTPLYDDWLRLLESFISSEDDGRPLILIGAGTGGLLCAEAAHRTGLVAHVIATCLLNPSDQPTRRALFRFSPLTRLIQGRLRNREIPVTRVLNFSKISRSPALSKLCAADEFNGAFKITWGFLASYVQHKAKLGAVPLTLMHPDHDLFDSR

SEQ ID NO: 383 - DNA, 680 bp, Corynebacterium glutamicum
  CDS (1)..(657): RXN00785
atcatcgctactctcggtgtgaccttgctggttgaggcccgcggattattcttgacggttgcgtccattcccattctgtttggtattttcacaccactgacttcgtggtttgtgtcccaacaaggcgtggctgcgaatgtgtcccctggtgtttccgtcacggaaatcctcacggctgtttatcctttggcgcagttgttccccaccctgatcatggtcactttggtggcggcattgatcgctgtggtgcggattattctgctgcgcaggaaccaggaatctcgtcaggtttctggggaacttacccggcgcgcgcagcgtgaggctgaggaagctaatcagaatgctgctcgtcgtgctcgcgcacagagcacgagggtacaaagttctaaaacacgtaaccgtcgcgcgcaaccaaccggcgataccggttcacaagtcacggttgatgagttgatcaggcgtagccaggagcgccggcaaactgttgcgcagcgccaaactgagcgcggtgtgccgtttactccaactccgggtcctgtggtggcccccaagccgcgcccgagcgcccctgaggcgccggctcctacggatgtgggtgagcgtcgacaagcagcccctaaacgccgcacctcgctcgacgatgatctgtacagctaaaaaatccccgctcatgtggc

SEQ ID NO: 384 - protein, 219 aa, Corynebacterium glutamicum
IIATLGVTLLVEARGLFLTVASIPILFGIFTPLTSWFVSQQGVAANVSPGVSVTEILTAVYPLAQLFPTLIMVTLVAALIAVVRIILLRRNQESRQVSGELTRRAQREAEEANQNAARRARAQSTRVQSSKTRNRRAQPTGDTGSQVTVDELIRRSQERRQTVAQRQTERGVPFTPTPGPVVAPKPRPSAPEAPAPTDVGERRQAAPKRRTSLDDDLYS

SEQ ID NO: 385 - DNA, 621 bp, Corynebacterium glutamicum
  CDS (1)..(621): FRXA00785
atcatcgctactctcggtgtgaccttgctggttgaggcccgcggattattcttgacggttgcgtccattcccattctgtttggtattttcacaccactgacttcgtggtttgtgtcccaacaaggcgtggctgcgaatgtgtcccctggtgtttccgtcacggaaatcctcacggctgtttatcctttggcgcagttgttccccaccctgatcatggtcactttggtggcggcattgatcgctgtggtgcggattattctgctgcgcaggaaccaggaatctcgtcaggtttctggggaacttacccggcgcgcgcagcgtgaggctgaggaagctaatcagaatgctgctcgtcgtgctcgcgcacagagcacgagggtacaaagttctaaaacacgtaaccgtcgcgcgcaaccaaccggcgataccggttcacaagtcacggttgatgagttgatcaggcgtagccaggagcgccggcaaactgttgcgcagcgccaaactgagcgcggtgtgccgtttactccaactccgggtcctgtggtggcccccaagccgcgcccgagcgcccctgaggcgccggctcctacggatgtgggtgagcgtcgacaagcagcccct

SEQ ID NO: 386 - protein, 207 aa, Corynebacterium glutamicum
IIATLGVTLLVEARGLFLTVASIPILFGIFTPLTSWFVSQQGVAANVSPGVSVTEILTAVYPLAQLFPTLIMVTLVAALIAVVRIILLRRNQESRQVSGELTRRAQREAEEANQNAARRARAQSTRVQSSKTRNRRAQPTGDTGSQVTVDELIRRSQERRQTVAQRQTERGVPFTPTPGPVVAPKPRPSAPEAPAPTDVGERRQAAP

SEQ ID NO: 387 - DNA, 651 bp, Corynebacterium glutamicum
  CDS (101)..(628): RXN00795
tttggattctggacacccaaaagggggtttcgtaccaaactcgtgacatactaggcgggtggctgagaaacgaccgaaaatttttgatggcagtcgagacatgattatctcgttggtagtctccgcgatcatcatgttggtagcggtgggattcacgggaatgtgttctttcaatacaggatcccctgaaaatgggcaggtacctgaagttgatgcttccacttttatgtcaatggaagcgcgcgcaatgactgatcatgcaactaggttgccggaaactcctgaaggctggaccacaaattcagctcgacgcaccatggtggatgacaccccggcatctgtagttggatatgtcaccgcagatgagggctatattcagctcactcaaactggtgaaaccgttgaggatgctgtggctggttatgatactcgctggcgtgatctttctgagtcttatgatcttgatggccacgacgtgggaatttacacctcacaggaatctgatgtgcgtgatctgcgtgtgatggatctgggcgatgcccgcgtcatggtctcgggtgctgctaccgatgaagaattcaatgatctgcttcgcgcagttgcgaattcggagccactgcctaccaattaagaattggtcgaaccaccaaa

SEQ ID NO: 388 - protein, 176 aa, Corynebacterium glutamicum
MIISLVVSAIIMLVAVGFTGMCSFNTGSPENGQVPEVDASTFMSMEARAMTDHATRLPETPEGWTTNSARRTMVDDTPASVVGYVTADEGYIQLTQTGETVEDAVAGYDTRWRDLSESYDLDGHDVGIYTSQESDVRDLRVMDLGDARVMVSGAATDEEFNDLLRAVANSEPLPTN

SEQ ID NO: 389 - DNA, 651 bp, Corynebacterium glutamicum; identical to SEQ ID NO: 387
  CDS (101)..(628): FRXA00795

SEQ ID NO: 390 - protein, 176 aa, Corynebacterium glutamicum; identical to SEQ ID NO: 388

SEQ ID NO: 391 - DNA, 825 bp, Corynebacterium glutamicum
  CDS (101)..(802): RXN00831
agctccaagaaagtcagtgctgtgcatggctcggtgctgctcatgcttttcggtgtttacatgatgagcatgttcgcctgatttaggtagcctggtgggaatgagtgcacttgagacattgcaatggcaggactggtcaagcgtcttaattgtggtagctcacccagatgatccggagtatgggctttccgcggctgttaaagaatggacagacgccggggtggaggtgtcttacctgctgctcacccacggggaggcaggtatccaaggtttagaccctaaagaaaccgggtcattgcgcgcagcggaacagcgggctgcatgtgatgtggtaggagttagaaatctcaccattttgaatcacccagattccatgttggtgtacaatctggtactgcgcaaagatattgctcgggaaatccggatccgtaaaccaaatgctgtggtggtatccaattttgatgtagaggcctacggtggtttgaaccaggcggatcaccgcgtggcgggattagccgcaattgatgcgacccgcgatgccgctaatccgtgggcgcagccagagctgttgcaggaggatctgcagccgtggggagctgaagtcatcatcattgccggacacccagagcccacccacaccatggatctggctaaagattctgttgatgccggagttgcatcccttcaagctcacaaggaatacttggccgctcttccagatcccccgaagccggaggagttcattccggcgtttctcgaggtagagggcggttacgcagcggccttccgagttttcggacggtaagcagggcgatacgtgatagg

SEQ ID NO: 392 - protein, 234 aa, Corynebacterium glutamicum
MSALETLQWQDWSSVLIVVAHPDDPEYGLSAAVKEWTDAGVEVSYLLLTHGEAGIQGLDPKETGSLRAAEQRAACDVVGVRNLTILNHPDSMLVYNLVLRKDIAREIRIRKPNAVVVSNFDVEAYGGLNQADHRVAGLAAIDATRDAANPWAQPELLQEDLQPWGAEVIIIAGHPEPTHTMDLAKDSVDAGVASLQAHKEYLAALPDPPKPEEFIPAFLEVEGGYAAAFRVFGR

SEQ ID NO: 393 - DNA, 825 bp, Corynebacterium glutamicum; identical to SEQ ID NO: 391
  CDS (101)..(802): FRXA00831

SEQ ID NO: 394 - protein, 234 aa, Corynebacterium glutamicum; identical to SEQ ID NO: 392

SEQ ID NO: 395 - DNA, 1077 bp, Corynebacterium glutamicum
  CDS (101)..(1054): RXN00835
actgcaccagcgccaacgatcgcaattttcatacctgctatcttgcctgagcacagataagatttgtaagcactaccccttctctacaaaggagtcatcaatggccggtggattggcagcactattagacgatgtcgcagcaattactcgagcggctgcagccagcctcgatgatgtcacggcgatggctggaaaaaccagcgttaaagccgcaggcgtggttgtagatgacacggcagttaccccgcaatatgttcaaggtgtcaaacctgcacgcgaactgcccatgatttggcggatcgctaagggctctttggtaaacaagatcatcatcattttgcccatcgcgttgcttctttccgcgtttgctccgtgggctctcacaccaattttgatgctgggcggctcctacctgtgcttcgaaggtgcagaaaagatctggcactccctccacaggcgcatcaaaggtgaacagcacagcaccgaacccaagtcgcaggaaagcccaaagtcagaggatcagctggtcaaaagtgccatcacaactgacctcatcctttccgcagagatcatggttatttcactcaatcagattgcagatcaaactatctggatgcaggctgcggttcttttcgtcgtaggtattggcatcaccgcgctcgtgtacggcgtagtcggtgttcttgtgaaaatggatgacgtcggacttacactttcaaagcgtgactccgcaggtatccagaaatttggccgcggcttggtcaaagcgatgcccatcgttcttcaagttatttctgttgtcggcgtttttgccatgctgtgggttggtggccacatcatggtcgttggaactgaagagttaggatgggaacttccctaccaccttgttcacggactagagtcctgggctaacggtatcggaggcagtgctctgggatgggttggcaatactttcgggtcacttgtgttcggcctcatttggggcgcgattatcaccgttgtggtcagtgtgatcaagaagttcattccacagcgtgcgcaaaactcgtctcattagtggagagttgttcgctgtaa

SEQ ID NO: 396 - protein, 318 aa, Corynebacterium glutamicum
MAGGLAALLDDVAAITRAAAASLDDVTAMAGKTSVKAAGVVVDDTAVTPQYVQGVKPARELPMIWRIAKGSLVNKIIIILPIALLLSAFAPWALTPILMLGGSYLCFEGAEKIWHSLHRRIKGEQHSTEPKSQESPKSEDQLVKSAITTDLILSAEIMVISLNQIADQTIWMQAAVLFVVGIGITALVYGVVGVLVKMDDVGLTLSKRDSAGIQKFGRGLVKAMPIVLQVISVVGVFAMLWVGGHIMVVGTEELGWELPYHLVHGLESWANGIGGSALGWVGNTFGSLVFGLIWGAIITVVVSVIKKFIPQRAQNSSH

SEQ ID NO: 397 - DNA, 713 bp, Corynebacterium glutamicum
  CDS (1)..(690): FRXA00835
tttgctccgtgggctctcacaccaattttgatgctgggcggctcctacctgtgcttcgaaggtgcagaaaagatctggcactccctccacaggcgcatcaaaggtgaacagcacagcaccgaacccaagtcgcaggaaagcccaaagtcagaggatcagctggtcaaaagtgccatcacaactgacctcatcctttccgcagagatcatggttatttcactcaatcagattgcagatcaaactatctggatgcaggctgcggttcttttcgtcgtaggtattggcatcaccgcgctcgtgtacggcgtagtcggtgttcttgtgaaaatggatgacgtcggacttacactttcaaagcgtgactccgcaggtatccagaaatttggccgcggcttggtcaaagcgatgcccatcgttcttcaagttatttctgttgtcggcgtttttgccatgctgtgggttggtggccacatcatggtcgttggaactgaagagttaggatgggaacttccctaccaccttgttcacggactagagtcctgggctaacggtatcggaggcagtgctctgggatgggttggcaatactttcgggtcacttgtgttcggcctcatttggggcgcgattatcaccgttgtggtcagtgtgatcaagaagttcattccacagcgtgcgcaaaactcgtctcattagtggagagttgttcgctgtaa

SEQ ID NO: 398 - protein, 230 aa, Corynebacterium glutamicum
FAPWALTPILMLGGSYLCFEGAEKIWHSLHRRIKGEQHSTEPKSQESPKSEDQLVKSAITTDLILSAEIMVISLNQIADQTIWMQAAVLFVVGIGITALVYGVVGVLVKMDDVGLTLSKRDSAGIQKFGRGLVKAMPIVLQVISVVGVFAMLWVGGHIMVVGTEELGWELPYHLVHGLESWANGIGGSALGWVGNTFGSLVFGLIWGAIITVVVSVIKKFIPQRAQNSSH

SEQ ID NO: 399 - DNA, 1816 bp, Corynebacterium glutamicum
  CDS (101)..(1816): RXN00836
ggagagttgttcgctgtaatttcgctgtacagttaatatgactttttactgtctcaatcaattcacaagtttgcacgaaatttaaggaaaggagtgcccaatgtatacccattcaacaggcactcctcagcttgatttcgacggtgacatctatccccttcacctcttcttctctgcacagactgcccaacatttcgctctcgagcgcgtcaattggcatgtcttacgcgctattgtgaaacctgagcaaggcgaactcatcgtcgaagcgcttctcgcaccaatagaatccgcaacaaaaatcggtgtttgggttcaagatgaatttctcggggtgattgcagagtcccagttcctgttgaattctcaattgtctcgaatttttgcctctggccacctgatttccagccaactacttctcacaccgagtaaaggatctctcgcttcagttcttcttccaaacctaaaattcgggctcatcagcaatgatcctccacgagctgattcccacctcttaccgctaggcagaatgtggcgcgttgagcccaccgttcatgctctgtttgaggatttctcacttggctccacgattctttttgggctgaggcttgatttagaagccctaattgtctcctataacggaatagaatgtggcatcttaaactttgatgacgcctcagcactaagctctgctgtgaaattctcaaatgcaaatggtctcacccccacggtgctcggccacgtagtccgggagaacggtgaaacatccttcgagattgacgttctcccactggagttgtggtcgaagaagcagcatcgccttgaggttttaaaaatccctcggttgatacctaaagaggcagattcccaaaattatgtgaaggcgacagcgctcctttcagacgagattctgcgaccacaaacgctgtccaaaaaggcactgtctttgtcggacaccgcagttaagtacagccctcatgttgcttgtggcgtggggatgtttagtcttttcgccgttattccctttgacaagttgagtgatcatagtgcgatgctgctcgcagtcattagcttgatgctttttgtgctggcattagtaattcttttcaagagaattcagtcaactaatactcagcgttggaacttggcctcgtcagtcggattactcgcgacacttccgattatcatattcctggttgctgatacattgattcctcagggcagcctggaaaaccatgctcaacccgacgtacaggtaacaacgttagctaacaggcggccaagttcacctacctcactggactcactaggcgcactgaattcaccaagttcgccgaattccccgagctcatcaatgctgcaaaactctgaaatgttcgcctcaccaccgatcgcctctgggcagtcaccggtttcgacgttccgctcatggctagatcgatccattctgccactcacacgagaaaattccgcttcagaaagcgcagtgacagctcttggaccgtcgatagtgcagcctgcatctgaatcgattacaactccagctcaaacgtcgcaaagtcgccacgcaattgacgatggtgacgacagtaaaacctcaacgggaagaccagctcccactactaactcgccgatcattgctcttcccccaacgtggattatcgggccggaagatccagaatccaccgaccctacagcaccaaccgagcccaccgagccaagcgaacctgtcgcaaccgacgaaccctcagagacctctgaacaaacttcacctctcttagctcgcgacacccccgaactgaaccggaaacaactg

SEQ ID NO: 400 - protein, 572 aa, Corynebacterium glutamicum
MYTHSTGTPQLDFDGDIYPLHLFFSAQTAQHFALERVNWHVLRAIVKPEQGELIVEALLAPIESATKIGVWVQDEFLGVIAESQFLLNSQLSRIFASGHLISSQLLLTPSKGSLASVLLPNLKFGLISNDPPRADSHLLPLGRMWRVEPTVHALFEDFSLGSTILFGLRLDLEALIVSYNGIECGILNFDDASALSSAVKFSNANGLTPTVLGHVVRENGETSFEIDVLPLELWSKKQHRLEVLKIPRLIPKEADSQNYVKATALLSDEILRPQTLSKKALSLSDTAVKYSPHVACGVGMFSLFAVIPFDKLSDHSAMLLAVISLMLFVLALVILFKRIQSTNTQRWNLASSVGLLATLPIIIFLVADTLIPQGSLENHAQPDVQVTTLANRRPSSPTSLDSLGALNSPSSPNSPSSSMLQNSEMFASPPIASGQSPVSTFRSWLDRSILPLTRENSASESAVTALGPSIVQPASESITTPAQTSQSRHAIDDGDDSKTSTGRPAPTTNSPIIALPPTWIIGPEDPESTDPTAPTEPTEPSEPVATDEPSETSEQTSPLLARDTPELNRKQL

SEQ ID NO: 401 - DNA, 1771 bp, Corynebacterium glutamicum
  CDS (101)..(1771): FRXA00836
ggagagttgttcgctgtaatttcgctgtacagttaatatgactttttactgtctcaatcaattcacaagtttgcacgaaatttaaggaaaggagtgcccaatgtatacccattcaacaggcactcctcagcttgatttcgacggtgacatctatccccttcacctcttcttctctgcacagactgcccaacatttcgctctcgagcgcgtcaattggcatgtcttacgcgctattgtgaaacctgagcaaggcgaactcatcgtcgaagcgcttctcgcaccaatagaatccgcaacaaaaatcggtgtttgggttcaagatgaatttctcggggtgattgcagagtcccagttcctgttgaattctcaattgtctcgaatttttgcctctggccacctgatttccagccaactacttctcacaccgagtaaaggatctctcgcttcagttcttcttccaaacctaaaattcgggctcatcagcaatgatcctccacgagctgattcccacctcttaccgctaggcagaatgtggcgcgttgagcccaccgttcatgctctgtttgaggatttctcacttggctccacgattctttttgggctgaggcttgatttagaagccctaattgtctcctataacggaatagaatgtggcatcttaaactttgatgacgcctcagcactaagctctgctgtgaaattctcaaatgcaaatggtctcacccccacggtgctcggccacgtagtccgggagaacggtgaaacatccttcgagattgacgttctcccactggagttgtggtcgaagaagcagcatcgccttgaggttttaaaaatccctcggttgatacctaaagaggcagattcccaaaattatgtgaaggcgacagcgctcctttcagacgagattctgcgaccacaaacgctgtccaaaaaggcactgtctttgtcggacaccgcagttaagtacagccctcatgttgcttgtggcgtggggatgtttagtcttttcgccgttattccctttgacaagttgagtgatcatagtgcgatgctgctcgcagtcattagcttgatgctttttgtgctggcattagtaattcttttcaagagaattcagtcaactaatactcagcgttggaacttggcctcgtcagtcggattactcgcgacacttccgattatcatattcctggttgctgatacattgattcctcagggcagcctggaaaaccatgctcaacccgacgtacaggtaacaacgttagctaacaggcggccaagttcacctacctcactggactcactaggcgcactgaattcaccaagttcgccgaattccccgagctcatcaatgctgcaaaactctgaaatgttcgcctcaccaccgatcgcctctgggcagtcaccggtttcgacgttccgctcatggctagatcgatccattctgccactcacacgagaaaattccgcttcagaaagcgcagtgacagctcttggaccgtcgatagtgcagcctgcatctgaatcgattacaactccagctcaaacgtcgcaaagtcgccacgcaattgacgatggtgacgacagtaaaacctcaacgggaagaccagctcccactactaactcgccgatcattgctcttcccccaacgtggattatcgggccggaagatccagaatccaccgaccctacagcaccaaccgagcccaccgagccaagcgaacctgtcgcaaccgacgaaccctcagagacctctgaacaaacttca

SEQ ID NO: 402 - protein, 557 aa, Corynebacterium glutamicum
MYTHSTGTPQLDFDGDIYPLHLFFSAQTAQHFALERVNWHVLRAIVKPEQGELIVEALLAPIESATKIGVWVQDEFLGVIAESQFLLNSQLSRIFASGHLISSQLLLTPSKGSLASVLLPNLKFGLISNDPPRADSHLLPLGRMWRVEPTVHALFEDFSLGSTILFGLRLDLEALIVSYNGIECGILNFDDASALSSAVKFSNANGLTPTVLGHVVRENGETSFEIDVLPLELWSKKQHRLEVLKIPRLIPKEADSQNYVKATALLSDEILRPQTLSKKALSLSDTAVKYSPHVACGVGMFSLFAVIPFDKLSDHSAMLLAVISLMLFVLALVILFKRIQSTNTQRWNLASSVGLLATLPIIIFLVADTLIPQGSLENHAQPDVQVTTLANRRPSSPTSLDSLGALNSPSSPNSPSSSMLQNSEMFASPPIASGQSPVSTFRSWLDRSILPLTRENSASESAVTALGPSIVQPASESITTPAQTSQSRHAIDDGDDSKTSTGRPAPTTNSPIIALPPTWIIGPEDPESTDPTAPTEPTEPSEPVATDEPSETSEQTS

SEQ ID NO: 403 - DNA, 837 bp, Corynebacterium glutamicum
  CDS (101)..(814): RXN00840
gcgattaatgtgacaggaggaaaagaagttaactgaagttactaatgtgactaaagttgttccctccgcattgtctcgttgaaaggtaagtaaaactcaagtgacaaagacactcccccgactgcttacagtcgctgccgctctagccattgcactcccggcaaccccggtagcatcggctgtcacaccagttgaacaagctttcaacgcctcatcgaatctctccagcggtctccccgtagaccaatggggacgccccaacgagcagttccgccaacaaatcgaacaggcagtaaaccaaccgtgggtcccgcaggaaatcaagaacatcgtttctcaggccatgggttttatcaccggtgacggcagcgaaggtggggacattgaaatccccgacaacgcaccacgcatcgcgcagttcttctggcccacccgatcagaaaactgcatcaacggaaattctgcagccgtaggatctgccttcgcagttccaggaccagcagatctccccctccccggcgcaggtgtcggccaaacctccttcgtgttcaccgcactgggaactggccccctcgcagaacagcaaagcaccgcaatgactgttcaatgggcaaacttaagcaacttcacccatggcaccacgacgttgagcaacaccggaatcaaccccgatggcccctcaacgatttccggtgtggcagacacaggacgcggcatcatcgtcgcctccatgtcaggcggcctcaccacatccaccgaaaacggttcagcgaactgtaatttcatcccgactgccgtcgtattcgatgtgaggtaagaaaacaatgactgatcttc

SEQ ID NO: 404 - protein, 238 aa, Corynebacterium glutamicum
VTKTLPRLLTVAAALAIALPATPVASAVTPVEQAFNASSNLSSGLPVDQWGRPNEQFRQQIEQAVNQPWVPQEIKNIVSQAMGFITGDGSEGGDIEIPDNAPRIAQFFWPTRSENCINGNSAAVGSAFAVPGPADLPLPGAGVGQTSFVFTALGTGPLAEQQSTAMTVQWANLSNFTHGTTTLSNTGINPDGPSTISGVADTGRGIIVASMSGGLTTSTENGSANCNFIPTAVVFDVR

SEQ ID NO: 405 - DNA, 837 bp, Corynebacterium glutamicum; identical to SEQ ID NO: 403
  CDS (101)..(814): FRXA00840

SEQ ID NO: 406 - protein, 238 aa, Corynebacterium glutamicum; identical to SEQ ID NO: 404

SEQ ID NO: 407 - DNA, 660 bp, Corynebacterium glutamicum
  CDS (101)..(637): RXN00841
gcctccatgtcaggcggcctcaccacatccaccgaaaacggttcagcgaactgtaatttcatcccgactgccgtcgtattcgatgtgaggtaagaaaacaatgactgatcttcatcccgtaaagcaggaaattttcaacactgctgaatccataaacacagatcccaaggggtttctccgcgaggtagacaccttcaaagtaaccgacttcggcctgtacatggctcgtggtgcaaaccaccccaagttcggatacttggaaagctggctcctcccagaacttggattgcgtgccaacattttccacttccgcaaaggcgtggatgaacgtcaggattactacatcgatgtcgctgaaattcgcgtcgaagacaacatctggaccacccgcgacctctacgtggatctcatctctgtctgcggagaaccagtaacagtcatggacatcgacgaactagctgcagcaacctcagcagggcttatcactgcagatgacgctgagcgcgcaattgatgccaccttgaatgctgttgaaggaatcacccgccacggcgacgatcctatgcagtggctgcgctccaagggaatcgaactcacctgggctgacgccagccaggtagagctcgtccctgcagagtaactacttcctaaccgctgctt

SEQ ID NO: 408 - protein, 179 aa, Corynebacterium glutamicum
MTDLHPVKQEIFNTAESINTDPKGFLREVDTFKVTDFGLYMARGANHPKFGYLESWLLPELGLRANIFHFRKGVDERQDYYIDVAEIRVEDNIWTTRDLYVDLISVCGEPVTVMDIDELAAATSAGLITADDAERAIDATLNAVEGITRHGDDPMQWLRSKGIELTWADASQVELVPAE

SEQ ID NO: 409 - DNA, 660 bp, Corynebacterium glutamicum; identical to SEQ ID NO: 407
  CDS (101)..(637): FRXA00841

SEQ ID NO: 410 - protein, 179 aa, Corynebacterium glutamicum; identical to SEQ ID NO: 408

SEQ ID NO: 411 - DNA, 993 bp, Corynebacterium glutamicum
  CDS (101)..(970): RXN00846
ctgcgggagactcgggtagaagcgaaaaataacggtatcctcggggctgcggatggctggcctgggggaatttcaagtgctgcaagttggaggaaaaacgatgttgaagaatgatctgtctggtgctcgagttgtagctgtgcatgcgcaccctgacgatgaggcgattaccaccggtggtgtgcttgcggatcttgctgctcgtggcgccgatgtcacggtaattacctgcacgttgggcgagcagggtgaggttatcggtgagacattcgcgcagctagtcaacggtgatgcggatcagcttggcgggtttaggatccatgagctttacgcctcgctggagattctgggcgtgcgtggcattcatctgggtggcgctggctgctggagggattccggtatggttggtgatcctgcaaatgagcatccgcgtgcgtttattcactctggtgaccgtgcagtggagcaattgaaagaacttcttgcggaattgaagccacatcttttgatcacctatggccctgacggcggctatgggcaccccgatcacattcgtgcgcatgaaatcacccacgcagcagccggcgagcaacgcattctgtgggctgtgagcgaccgtgaggagctcgaggacggtctaaaggcaatcactgggcttcctgaaggttggggcaggggagagctctctgcggtcgattccgtggacctctctgttgagctgaacgatgaagtgtatgccaccaaggtggaatccatgcgcgcgcatgcgacacaattgtggatcgctgacggttccgtatctcgcaccaacccggttgccgcacacgcagtgacacagcaggacaatgtgaaggtgtgggcgctatctaatttgattgcacaacccatcatgcgccacgagcactaccaactcggcgccggaacaccactgcctgaaggtgcaactggagtgcttgacggactggagttctgacacggttatggcagaatcta

SEQ ID NO: 412 - protein, 290 aa, Corynebacterium glutamicum
MLKNDLSGARVVAVHAHPDDEAITTGGVLADLAARGADVTVITCTLGEQGEVIGETFAQLVNGDADQLGGFRIHELYASLEILGVRGIHLGGAGCWRDSGMVGDPANEHPRAFIHSGDRAVEQLKELLAELKPHLLITYGPDGGYGHPDHIRAHEITHAAAGEQRILWAVSDREELEDGLKAITGLPEGWGRGELSAVDSVDLSVELNDEVYATKVESMRAHATQLWIADGSVSRTNPVAAHAVTQQDNVKVWALSNLIAQPIMRHEHYQLGAGTPLPEGATGVLDGLEF

SEQ ID NO: 413 - DNA, 487 bp, Corynebacterium glutamicum
  CDS (101)..(487): FRXA00846
ctgcgggagactcgggtagaagcgaaaaataacggtatcctcggggctgcggatggctggcctgggggaatttcaagtgctgcaagttggaggaaaaacgatgttgaagaatgatctgtctggtgctcgagttgtagctgtgcatgcgcaccctgacgatgaggcgattaccaccggtggtgtgcttgcggatcttgctgctcgtggcgccgatgtcacggtaattacctgcacgttgggcgagcagggtgaggttatcggtgagacattcgcgcagctagtcaacggtgatgcggatcagcttggcgggtttaggatccatgagctttacgcctcgctggagattctgggcgtgcgtggcattcatctgggtggcgctggctgctggagggattccggtatggttggtgatcctgcaaatgagcatccgcgtgcgtttattcactctggtgaccgtgcagtggagcaattgaaagaacttcttgcg

SEQ ID NO: 414 - protein, 129 aa, Corynebacterium glutamicum
MLKNDLSGARVVAVHAHPDDEAITTGGVLADLAARGADVTVITCTLGEQGEVIGETFAQLVNGDADQLGGFRIHELYASLEILGVRGIHLGGAGCWRDSGMVGDPANEHPRAFIHSGDRAVEQLKELLA

SEQ ID NO: 415 - DNA, 951 bp, Corynebacterium glutamicum
  CDS (101)..(928): RXN00850
ggcagttgtgccggtatacgtggcgtcatggataatgatcgcataaatgaatacagcgaaattacctgtttcagatatttaggaaggctcacttttcaacatggctaatccattctccaaggcatggaagtacctcatggcgttgttcgactccaagattgaggagaacgcggatcctaaggtacagatccagcaagccatcgaagatgctcagcgccagcatcaggagctctcccagcaggcagcagctgttattggtaaccagcgtcagcttgaaatgcagctgaaccgccgtctggctgaaattgagaagctgcagggcaacacccgccaggctatccagctggctgacaaggctcgcgctgacggtgatgtcaagaaggctactgagtacgaaaacgccgctgaggctttcgctgcacagctggttactgctgagcagtccgttgaagataccaagcagctccacgaccaggctctgcagcaggctgatcaggctaagaaggctgtggagcgtaactccatggctttgcagcagaaggttgctgagcgcaccaagcttctgagccagctggagcaggcgaagatgcaggaaaaggtttccgagtccctgaagtccatggattctttgacctccggcagcactcctaacctggatcaagttcgtgagaagattgagcgtcgttacgctaacgcgcttggccaggctgagcttgcgtccaactctgttgagggccgcatggctgaggttgagcaggctggcgttcagatggctggacactcccgccttgagcagatccgcgctgagatggctggtggttccctgaccgctggtaacaagcaggagtccattgaggctcctgcagcgggcaacaacgtcactgatgacgcagttgcacagcgcatgcgtgagctgcgcggcgaggcttaaacctgccacagcagactaaa

SEQ ID NO: 416 - protein, 276 aa, Corynebacterium glutamicum
MANPFSKAWKYLMALFDSKIEENADPKVQIQQAIEDAQRQHQELSQQAAAVIGNQRQLEMQLNRRLAEIEKLQGNTRQAIQLADKARADGDVKKATEYENAAEAFAAQLVTAEQSVEDTKQLHDQALQQADQAKKAVERNSMALQQKVAERTKLLSQLEQAKMQEKVSESLKSMDSLTSGSTPNLDQVREKIERRYANALGQAELASNSVEGRMAEVEQAGVQMAGHSRLEQIRAEMAGGSLTAGNKQESIEAPAAGNNVTDDAVAQRMRELRGEA

SEQ ID NO: 417 - DNA, 336 bp, Corynebacterium glutamicum
  CDS (101)..(313): RXN00854
ttcatccgccctggaagacggtcatgacggggacccttcttagggtcgctgtcggagattggacacgtaacttctgtgcttgcgctgtattatcgtccccatgcgtttatcggagtttcggcaactcattgaagatgaattcggagaagccaaaggggagtggattgcacactcgcatgtgattggtgccctcggcgtcactgcagatgttgcagtagataccggggttgatctgcgcgatgtatgggaacaactgtgcattgatttcagtgttcccgaagagcgacgacttggtaaagatgaaccagggttctagcttgttcgagggggttcgca

SEQ ID NO: 418 - protein, 71 aa, Corynebacterium glutamicum
MRLSEFRQLIEDEFGEAKGEWIAHSHVIGALGVTADVAVDTGVDLRDVWEQLCIDFSVPEERRLGKDEPGF

SEQ ID NO: 419 - DNA, 336 bp, Corynebacterium glutamicum; identical to SEQ ID NO: 417
  CDS (101)..(313): FRXA00854

SEQ ID NO: 420 - protein, 71 aa, Corynebacterium glutamicum; identical to SEQ ID NO: 418

SEQ ID NO: 421 - DNA, 408 bp, Corynebacterium glutamicum
  CDS (101)..(385): RXN00855
taaaaacctctcgacggacgaagcgccacaaaagcaagagaagaatataagtgaaccaaattccgtttagtgtacgtctagacgcctaaacttacctgttatgacttattttgccgtgctttacacatacaacccagacagcgagaaagtcgctgaagttcgtaccgtccaccgcgagttcattgccaaccttcatgcggagggcaaaatcgttggctccggtcctttcgtggacggcgacggtggcgcgctgattgtcatcaagttggaagaaggctccaaccttgttgatgctgaaaccctgatgaacaatgatccattccacgtagaaaacgtgctggacaaccgcgtcatccgtagctggaaccctgtgaccaaagatttctaggcaactttttctttaacaat

SEQ ID NO: 422 - protein, 95 aa, Corynebacterium glutamicum
MTYFAVLYTYNPDSEKVAEVRTVHREFIANLHAEGKIVGSGPFVDGDGGALIVIKLEEGSNLVDAETLMNNDPFHVENVLDNRVIRSWNPVTKDF

SEQ ID NO: 423 - DNA, 408 bp, Corynebacterium glutamicum; identical to SEQ ID NO: 421
  CDS (101)..(385): FRXA00855

SEQ ID NO: 424 - protein, 95 aa, Corynebacterium glutamicum; identical to SEQ ID NO: 422

SEQ ID NO: 425 - DNA, 1044 bp, Corynebacterium glutamicum
  CDS (101)..(1021): RXN00869
gccaacaccgcgggtgcgcttgtggcgtcccgtcttgaatgctccaccgcaatgcctactaccgatgaggtggaagcctccctcaaccagaaagtctgatatgactcctccgattatctccccagagagctttgaagccctaaggcggatgcgtgcggctgaacccacgatggtggcggaacgtttcaagcagcgccgtaagcgtgaactgctcggtgaggacggcaagctgtttatcgtggctgccgaccacccagcgcgcggcgcacttgctgttggcgacaatgaaaccgccatggctaaccgctatgaactgctcgaacgcatggctatcgcactgtctcgcccgggtgtggatggtgtgctgggaactccagacatcattgatgatctggcggcgctcggactgctcgatgacaagatcgtggttggctccatgaaccgtggtggcctgcgtggcgcttcctttgaaatggatgatcgctacaccggctacaacgtgtcctccatggttgatcgtggcgtggatttcgcgaaaaccctagtgcgcatcaacttgagcgacgccggaaccgccccgaccttggaagccaccgcgcatgcagtcaatgaggctgcagcagcacagctgcccatcatgctcgagccgttcatgagtaactgggtaaacggcaaggtggtcaatgatctttccaccgatgcagttatccaatctgtcgccattgctgctggtctgggcaatgattcttcctatacctggatgaagcttccagtggtggaggagatggagcgcgtcatggaatccaccaccatgccaaccctgttgttgggcggcgaaggcggcaacgatccagatgccaccttcgcatcctgggagcatgcactcaccctgccgggtgtgcgtggcctgaccgtgggacgcactctgctgtatccgcaagacggcgatgtcgccgccgctgttgataccgcagcgcgacttgttcacacagatattcaacaattcacttcgcagagcatttaaggaatttacacacatgtctg

SEQ ID NO: 426 - protein, 307 aa, Corynebacterium glutamicum
MTPPIISPESFEALRRMRAAEPTMVAERFKQRRKRELLGEDGKLFIVAADHPARGALAVGDNETAMANRYELLERMAIALSRPGVDGVLGTPDIIDDLAALGLLDDKIVVGSMNRGGLRGASFEMDDRYTGYNVSSMVDRGVDFAKTLVRINLSDAGTAPTLEATAHAVNEAAAAQLPIMLEPFMSNWVNGKVVNDLSTDAVIQSVAIAAGLGNDSSYTWMKLPVVEEMERVMESTTMPTLLLGGEGGNDPDATFASWEHALTLPGVRGLTVGRTLLYPQDGDVAAAVDTAARLVHTDIQQFTSQSI

SEQ ID NO: 427 - DNA, 815 bp, Corynebacterium glutamicum
  CDS (1)..(792): FRXA00869
ctgtttatcgtggctgccgaccacccagcgcgcggcgcacttgctgttggcgacaatgaacccgccatggctaaccgctatgaactgctcgaacgcatggctatcgcactgtctcgcccgggtgtggatggtgtgctgggaactccagacatcattgatgatctggcggcgctcggactgctcgatgacaagatcgtggttggctccatgaaccgtggtggcctgcgtggcgcttcctttgaaatggatgatcgctacaccggctacaacgtgtcctccatggttgatcgtggcgtggatttcgcgaaaaccctagtgcgcatcaacttgagcgacgccggaaccgccccgaccttggaagccaccgcgcatgcagtcaatgaggctgcagcagcacagctgcccatcatgctcgagccgttcatgagtaactgggtaaacggcaaggtggtcaatgatctttccaccgatgcagttatccaatctgtcgccattgctgctggtctgggcaatgattcttcctatacctggatgaagcttccagtggtggaggagatggagcgcgtcatggaatccaccaccatgccaaccctgttgttgggcggcgaaggcggcaacgatccagatgccaccttcgcatcctgggagcatgcactcaccctgccgggtgtgcgtggcctgaccgtgggacgcactctgctgtatccgcaagacggcgatgtcgccgccgctgttgataccgcagcgcgacttgttcacacagatattcaacaattcacttcgcagagcatttaaggaatttacacacatgtctg

SEQ ID NO: 428 - protein, 264 aa, Corynebacterium glutamicum
LFIVAADHPARGALAVGDNEPAMANRYELLERMAIALSRPGVDGVLGTPDIIDDLAALGLLDDKIVVGSMNRGGLRGASFEMDDRYTGYNVSSMVDRGVDFAKTLVRINLSDAGTAPTLEATAHAVNEAAAAQLPIMLEPFMSNWVNGKVVNDLSTDAVIQSVAIAAGLGNDSSYTWMKLPVVEEMERVMESTTMPTLLLGGEGGNDPDATFASWEHALTLPGVRGLTVGRTLLYPQDGDVAAAVDTAARLVHTDIQQFTSQSI

SEQ ID NO: 429 - DNA, 753 bp, Corynebacterium glutamicum
  CDS (101)..(730): RXN00915
cttggctgcaggtccaccatcagcacaggtctttgacatgaacgtagctcgccgcgacgtttcttcaggaccttctctacctggtgagggtgagttctaaatgtccgccgcctattcgcaggacaccattttgacggtgtttctggggaggggtctgaccgctgaagggatccgacagaccctagaagacttcgcagaaaccggcctagtccgcaacctggtgtggattgatgccgatagtttccacgagtcttcatctgaagtcacccacttggcaaccaaccaagacggtcttccggagcttcagcgacgacctttcaatgagttggtgtcccggtcacgaaccaccaagcttcacatcggtgtcatcaacgtcattgatggcagcgaaggcatgcttcatgcagaagaactcaacccattggttgggatcatcgacagtgtctgttcacaccaccaaattcaccgatccaacgtgatgatcggtgcggtggctgccacacttgatgaggaacttccaattcttcgtggttatgtgaacctgatgctggcacctgaagatagccacagcccaggcaccgcaacagtgacctaccgtcatggtttcagcgatcaccgtttaccctgcactgcgtggctaatatcgccagcttgtacggactgtgggaaggcagcacatccacaccaatcgaacagctcgtacctgcgaaaggttccagctttcgtttggtgaggtctttttacaggcgaatt

SEQ ID NO: 430 - protein, 210 aa, Corynebacterium glutamicum
MSAAYSQDTILTVFLGRGLTAEGIRQTLEDFAETGLVRNLVWIDADSFHESSSEVTHLATNQDGLPELQRRPFNELVSRSRTTKLHIGVINVIDGSEGMLHAEELNPLVGIIDSVCSHHQIHRSNVMIGAVAATLDEELPILRGYVNLMLAPEDSHSPGTATVTYRHGFSDHRLPCTAWLISPACTDCGKAAHPHQSNSSYLRKVPAFVW

SEQ ID NO: 431 - DNA, 610 bp, Corynebacterium glutamicum
  CDS (101)..(610): FRXA00915
cttggctgcaggtccaccatcagcacaggtctttgacatgaacgtagctcgccgcgacgtttcttcaggaccttctctacctggtgagggtgagttctaaatgtccgccgcctattcgcaggacaccattttgacggtgtttctggggaggggtctgaccgctgaagggatccgacagaccctagaagacttcgcagaaaccggcctagtccgcaacctggtgtggattgatgccgatagtttccacgagtcttcatctgaagtcacccacttggcaaccaaccaagacggtcttccggagcttcagcgacgacctttcaatgagttggtgtcccggtcacgaaccaccaagcttcacatcggtgtcatcaacgtcattgatggcagcgaaggcatgcttcatgcagaagaactcaacccattggttgggatcatcgacagtgtctgttcacaccaccaaattcaccgatccaacgtgatgatcggtgcggtggctgccacacttgatgaggaacttccaattcttcgtggttatgtgaacctgatgctggcacctgaagatagccacagcccaggcaccgcaacagtgacctaccgtcatggtttcagc

SEQ ID NO: 432 - protein, 170 aa, Corynebacterium glutamicum
MSAAYSQDTILTVFLGRGLTAEGIRQTLEDFAETGLVRNLVWIDADSFHESSSEVTHLATNQDGLPELQRRPFNELVSRSRTTKLHIGVINVIDGSEGMLHAEELNPLVGIIDSVCSHHQIHRSNVMIGAVAATLDEELPILRGYVNLMLAPEDSHSPGTATVTYRHGFS

SEQ ID NO: 433 - DNA, 2802 bp, Corynebacterium glutamicum
  CDS (101)..(2779): RXN00917
tgccgtggaagaaagcgctctttactgcgacagccgtcctattggtgtttgctgttgtgtggtcggccttggatattgccctgtgggtaggaaagcagtcatggtgaacacgttgaactctaaaaccgtgaatgtaccccgttttgccagaggcgttgttgctgcagccacagcgctattttttggcgctttggtaagcctcgcgcctagtgcgttggcgcaggaaccacctgcagttgaggccggagcgtcaggttctttgagcaacctgggtgcctgcatcgctgataaaggcactcttgatgtcatcatcatgatcgatgagacagaatccttgatccatgaagctcgtgacggcgtggtcaacgccaatgaaccaggcgcggacgcacagcaccaccgtgttcctgcagcacagagctttgtggatgagcttctagccaagcaaagcgatggtgatctgaacacccgcatccgtgttgctggtttcggccagacgtacaaatctggtgccactgatccagacaattacggagcatggacgcaactagatgcctccaccgttggcggagtacaagatgaaatctcccgcttcgctgaccgcacccaggagcagtacaccaactacgcctccgcgattgagggcgcttaccaggacttcactaggtccggctctgaggacgcctgccgcatgctggtgaccttcaccgacggcgcactgaccgctcaagaaggcgccgatgttgcagaagcagcactgtgcgcgccgggtggcgtcaccgatcgactgcgcagtgctggcatcacccacatcggcatcggtttatcggcacctaccaacccatctgatttcagcctgctgcgcggaaccaccgcaggtggcggaacatgtggtgtcgaaccagctaacggtgcattcttcccagcagataacgtgggcggacttttcgcagcattccgtgaagcccttgcgattggtggtgaaacaattggtgaaacccgagctggtgatcctttcagcttcaccctggacaactcggtgaactctgtgcgtttcaccgcgatcgccaaggatgatctcggcccgaacgcccacttggtgctcaccgcacccaacggcgaaacggttgagctcaaagattctggaagcagcgtcgccaacagcactgacgtgagttgggaagccgaaagcagcccagtaaaaatggctgatggttccctcaacctgcagcaaggtggggattggaagggtgtctggcagattcagttccaaggaattgatcctgcagcggttgatggacgcgtattcaactcagtggagatccagcctgacctccagcttgtgttcagtggcggtgattcgacgtcaggtgcacttaaccttcgcgatgatcagcagctgaatatgcagctggtgggccgtgatggtcagccacgcatccttgaggggtccgcgctggtcgatcttggtttcacccgcgcagataccggcgagttcgcccctttggctcaaggaattgatatttctggcggcgaattaagcttcccgctggatacgatttcgcagctcccagccatcggcacggtggaagcgcgtaccacgatcaccaccgcaggcgtcgatgatctccccggcaccacgttgagcccaattctcaacaccacgcgcatcaccatcactcagcgcgatatgcctcagctgccagcgtcggttcgcttcacagcggatgaggacgttgttaccgtagacatccccatcaccggccccggcaaggtatggattgcaccgggaacccagctcagcggagtgcttccagacggcgtggacggcattgcagcatcaagtactttcgacagcccagataatgctttggtgctcggactggatgagcagggcacgattcctgttgaactaaccgtgagcgatcttcgtgacggactggtcaacggctcgattccactccagatctccaacgctgagggcgccaatgaaaccagcgtggatctgccgacagaaggcacgttgagcgttcccattaacgcctccactttcgcattggcattcattttggcccttgtgctttccctcctgattccgctgctcattttgtatattgtgcgtttcctctccgcaaaggttccgtcctctgcgatgagtggcgtgcgcattccagtggaattctccggtgaagctctgcgctatgcgggcagcactatgcctgatctcgcatcgcaaaccaccgccaccaagcaggtcgttgttcatggagacaccttcaatgtggaaggccacaaacttaaagtccagcgcttccagctgaacccgattgcgtctcctgcagtgatcgtgcagaccgacccgtcgatcagcttcgacggcaaacaaaagggcacacaagctaaactcccgctggcggtccaaggcagttggttcctcactgcaagcggcgctgacccttccaagatggaactcatcgccctgacaaacctgccgctcgagcagggccaaatcgaccgcatgatcgcaggtatcaccagcaaagcccctgatagggcacgcgaactacaaaaattgcttgacgacgccgcgacctcccagcccgcaaaggttccaccgcgcgccccagccgcgcagggccacgtcgaaaagcaagctcctagttttggcactggttccggtggtggtttcggctccagcaatggtggaggctttggctccggtagcggatccaacgacacaaatggtggatttggttccagcggcggcttcggcgcgcgataacctgtaacttgcgattaaaa

SEQ ID NO: 434 - protein, 893 aa, Corynebacterium glutamicum
MVNTLNSKTVNVPRFARGVVAAATALFFGALVSLAPSALAQEPPAVEAGASGSLSNLGACIADKGTLDVIIMIDETESLIHEARDGVVNANEPGADAQHHRVPAAQSFVDELLAKQSDGDLNTRIRVAGFGQTYKSGATDPDNYGAWTQLDASTVGGVQDEISRFADRTQEQYTNYASAIEGAYQDFTRSGSEDACRMLVTFTDGALTAQEGADVAEAALCAPGGVTDRLRSAGITHIGIGLSAPTNPSDFSLLRGTTAGGGTCGVEPANGAFFPADNVGGLFAAFREALAIGGETIGETRAGDPFSFTLDNSVNSVRFTAIAKDDLGPNAHLVLTAPNGETVELKDSGSSVANSTDVSWEAESSPVKMADGSLNLQQGGDWKGVWQIQFQGIDPAAVDGRVFNSVEIQPDLQLVFSGGDSTSGALNLRDDQQLNMQLVGRDGQPRILEGSALVDLGFTRADTGEFAPLAQGIDISGGELSFPLDTISQLPAIGTVEARTTITTAGVDDLPGTTLSPILNTTRITITQRDMPQLPASVRFTADEDVVTVDIPITGPGKVWIAPGTQLSGVLPDGVDGIAASSTFDSPDNALVLGLDEQGTIPVELTVSDLRDGLVNGSIPLQISNAEGANETSVDLPTEGTLSVPINASTFALAFILALVLSLLIPLLILYIVRFLSAKVPSSAMSGVRIPVEFSGEALRYAGSTMPDLASQTTATKQVVVHGDTFNVEGHKLKVQRFQLNPIASPAVIVQTDPSISFDGKQKGTQAKLPLAVQGSWFLTASGADPSKMELIALTNLPLEQGQIDRMIAGITSKAPDRARELQKLLDDAATSQPAKVPPRAPAAQGHVEKQAPSFGTGSGGGFGSSNGGGFGSGSGSNDTNGGFGSSGGFGAR

SEQ ID NO: 435 - DNA, 1406 bp, Corynebacterium glutamicum
  CDS (1)..(1383): FRXA00917
cagctgaatatgcagctggtgggccgtgatggtcagccacgcatccttgaggggtccgcgctggtcgatcttggtttcacccgcgcagataccggcgagttcgcccctttggctcaaggaattgatatttctggcggcgaattaagcttcccgctggatacgatttcgcagctcccagccatcggcacggtggaagcgcgtaccacgatcaccaccgcaggcgtcgatgatctccccggcaccacgttgagcccaattctcaacaccacgcgcatcaccatcactcagcgcgatatgcctcagctgccagcgtcggttcgcttcacagcggatgaggacgttgttaccgtagacatccccatcaccggccccggcaaggtatggattgcaccgggaacccagctcagcggagtgcttccagacggcgtggacggcattgcagcatcaagtactttcgacagcccagataatgctttggtgctcggactggatgagcagggcacgattcctgttgaactaaccgtgagcgatcttcgtgacggactggtcaacggctcgattccactccagatctccaacgctgagggcgccaatgaaaccagcgtggatctgccgacagaaggcacgttgagcgttcccattaacgcctccactttcgcattggcattcattttggcccttgtgctttccctcctgattccgctgctcattttgtatattgtgcgtttcctctccgcaaaggttccgtcctctgcgatgagtggcgtgcgcattccagtggaattctccggtgaagctctgcgctatgcgggcagcactatgcctgatctcgcatcgcaaaccaccgccaccaagcaggtcgttgttcatggagacaccttcaatgtggaaggccacaaacttaaagtccagcgcttccagctgaacccgattgcgtctcctgcagtgatcgtgcagaccgacccgtcgatcagcttcgacggcaaacaaaagggcacacaagctaaactcccgctggcggtccaaggcagttggttcctcactgcaagcggcgctgacccttccaagatggaactcatcgccctgacaaacctgccgctcgagcagggccaaatcgaccgcatgatcgcaggtatcaccagcaaagcccctgatagggcacgcgaactacaaaaattgcttgacgacgccgcgacctcccagcccgcaaaggttccaccgcgcgccccagccgcgcagggccacgtcgaaaagcaagctcctagttttggcactggttccggtggtggtttcggctccagcaatggtggaggctttggctccggtagcggatccaacgacacaaatggtggatttggttccagcggcggcttcggcgcgcgataacctgtaacttgcgattaaaa

SEQ ID NO: 436 - protein, 461 aa, Corynebacterium glutamicum
QLNMQLVGRDGQPRILEGSALVDLGFTRADTGEFAPLAQGIDISGGELSFPLDTISQLPAIGTVEARTTITTAGVDDLPGTTLSPILNTTRITITQRDMPQLPASVRFTADEDVVTVDIPITGPGKVWIAPGTQLSGVLPDGVDGIAASSTFDSPDNALVLGLDEQGTIPVELTVSDLRDGLVNGSIPLQISNAEGANETSVDLPTEGTLSVPINASTFALAFILALVLSLLIPLLILYIVRFLSAKVPSSAMSGVRIPVEFSGEALRYAGSTMPDLASQTTATKQVVVHGDTFNVEGHKLKVQRFQLNPIASPAVIVQTDPSISFDGKQKGTQAKLPLAVQGSWFLTASGADPSKMELIALTNLPLEQGQIDRMIAGITSKAPDRARELQKLLDDAATSQPAKVPPRAPAAQGHVEKQAPSFGTGSGGGFGSSNGGGFGSGSGSNDTNGGFGSSGGFGAR

SEQ ID NO: 437 - DNA, 536 bp, Corynebacterium glutamicum
  CDS (1)..(513): RXN00921
cctgcggcaatcctcttggaccatatcgttccgaacttcagcagagatcggtctttgccagacatcgaagactggacgagaagcgatgaagctcagcagatctttgcaggaatcattgcgggtgcgtctgttcaaactggtagaagccacttcatgtgggatcttttgcgggcgtattttggagtcgctttgatcggcgacgaagatacctacagggcttttactactctcacggtcgattctgttcttagtttcgtgcagttaactcttcaagagggcagaacggaagacattagacgattcgagaaatatggtgagcagattgcccgagaggatttgccgtcgattctcaccaatgctcgagcagtacagcaatatctcggctatatcgaccaagatatcatcaataagaaagtgtcccggtctagggatgttaaccagatttttactgagatggcgcgcgctatcatcagagcaattagccggaataatattggaaaggacatgcggtcatgaacgtgattcgactggattcc

SEQ ID NO: 438 - protein, 171 aa, Corynebacterium glutamicum
PAAILLDHIVPNFSRDRSLPDIEDWTRSDEAQQIFAGIIAGASVQTGRSHFMWDLLRAYFGVALIGDEDTYRAFTTLTVDSVLSFVQLTLQEGRTEDIRRFEKYGEQIAREDLPSILTNARAVQQYLGYIDQDIINKKVSRSRDVNQIFTEMARAIIRAISRNNIGKDMRS

SEQ ID NO: 439 - DNA, 2022 bp, Corynebacterium glutamicum
  CDS (101)..(1999): FRXA00921
tctgggaacgtggattggtggaagcaggtgagttgcccgtggccttgagatggactcatgtcacctacgcgtcctttagaggaactgcaggtaggggtgggtggaaggtggaacttggtctgctcaggccactaaagaagacctccaatttatcgcggaggttgcgcccactcatattgaaacggtgaccccttttgatgatttcatctcatcagaagatatcgatgcgttgccgaggaggtttgagtaccgtcctttggcaggccgatcgttgatcatgcagtctgttcctgcaggtaaagatgccactggacgtccagggaatgtgttcacccatgcagtatttgatggggatctagaaagcccactggagtctgtttatcccatttccctgtaccgttcacctgatttgctgaccccttttcgtgcagccgcggtcaacgctgccgagctccctttggatgcaggcgagccgagaattggccccatcactgatctgtccttgtcgtggatgatgatcgacagcatgtttggcgatcgcagacagcagttctaccagcttcaagatgctctccaagctggagataaagctactgttttggttctgaacagcactaacgaggcagcatattggcttcaagcgttgtcttctacattgactccgaatgaagcccggcgtctgttgcacttctcaacctttgagcgtgctgctaccttgccagctccagataaatcaatggaggctcgttctctgtttgtggtcccaggaattgatcgtgaattgttggcggagcattcagggattgtgattatcgatccggagattccacagagccaacctttcggcccgcagggatcctggtcccgaatgacagaagggctcttctccgacggttttgatgctgatgaacttgtcgcagggctgattcgtgccaacgagaacctggataatagccaaaaggaactcgctcaatttggagacggtttagcgcgatttatccggaatggccgtttttccggcacgcacccgcttcgcgtacttgctgatcagcatatgtttggaaaggtgccagacaagccagcacctaaggtggagcctgtcgctccggcaccaaaccccaatgcaatttgggcgcgtgcatctgaggtagttcacaatcctcggagagcatcagaatcacaagattggccaagtctgaggcgattgccggatagtcggcgcaggatcatcaatatgtcagagcaggcgatcaacagcattgagaagcttcatgattcgccggcacaggatcttgttgcctatttggatttccttttgaaaactgagcttgcgacaagcattaatgcttcggatcccttttttcggagtagtttttcagactttccagcgatggacaactggcgacacattaagttcaccgaggatgcgcaccctcgcttgagggaactactcgtggacgcagaacgcgatgctaggaacagagcacctgcggcaatcgtcttggaccatatcgttccgaacttcagcagagatcggtctttgccagacatcgaagactggacgagaagcgatgaagctcagcagatctttgcaggaatcattgcgggtgcgtctgttcaaactggtagaagccacttcatgtgggatcttttgcgggcgtattttggagtcgctttgatcggcgacgaagatacctacagggcttttactactctcacggtcgattctgttcttagtttcgtgcagttaactcttcaagagggcagaacggaagacattagacgattcgagaaatatggtgagcagattgcccgagaggatttgccgtcgattctcaccaatgctcgagcagtacagcaatatctcggctatatcgaccaagatatcatcaataagaaagtgtcccggtctagggatgttaaccagatttttactgagatggcgcgcgctatcatcagagcaattagccggaataatattggaaaggacatgcggtcatgaacgtgattcgactggattcc

SEQ ID NO: 440 - protein, 633 aa, Corynebacterium glutamicum
VEGGTWSAQATKEDLQFIAEVAPTHIETVTPFDDFISSEDIDALPRRFEYRPLAGRSLIMQSVPAGKDATGRPGNVFTHAVFDGDLESPLESVYPISLYRSPDLLTPFRAAAVNAAELPLDAGEPRIGPITDLSLSWMMIDSMFGDRRQQFYQLQDALQAGDKATVLVLNSTNEAAYWLQALSSTLTPNEARRLLHFSTFERAATLPAPDKSMEARSLFVVPGIDRELLAEHSGIVIIDPEIPQSQPFGPQGSWSRMTEGLFSDGFDADELVAGLIRANENLDNSQKELAQFGDGLARFIRNGRFSGTHPLRVLADQHMFGKVPDKPAPKVEPVAPAPNPNAIWARASEVVHNPRRASESQDWPSLRRLPDSRRRIINMSEQAINSIEKLHDSPAQDLVAYLDFLLKTELATSINASDPFFRSSFSDFPAMDNWRHIKFTEDAHPRLRELLVDAERDARNRAPAAIVLDHIVPNFSRDRSLPDIEDWTRSDEAQQIFAGIIAGASVQTGRSHFMWDLLRAYFGVALIGDEDTYRAFTTLTVDSVLSFVQLTLQEGRTEDIRRFEKYGEQIAREDLPSILTNARAVQQYLGYIDQDIINKKVSRSRDVNQIFTEMARAIIRAISRNNIGKDMRS

SEQ ID NO: 441 - DNA, 1035 bp, Corynebacterium glutamicum
  CDS (101)..(1012): RXN00943
taggtacgatcggacgaggagaaaaaatctgaaaacaatccagtggcccacctcggcttataaaactggacaacagtattttgattggagcatcaccataatgatccgcaaacttgctcgaccaatgcttgcatcggtctacgtcgcagatggcgcagaaacagtattgaacaccagcgcacacgtcgaaggcactcaggtagttctggatcgtatccgttatgtgctgccccgtaagtacgcaaagcgcatttccagagatccagaattggtcacccgcgtcattggcggcaccaaagtcggtgcgggttctttgctagctattggtcgtgcaccacgcacctctgcagctaccctcgcaatcctgactatccctaacatcctggctcgcaatgcgttctgggaaacccaggatgcggatgaaaagcgtaaccgccgcaacggtttcctcaccaacattgccctgcttggtggcctgtttatcacttctgttgatactgagggcaagcctggcgtgaagtggcgtgcaaccaatgctacaaagcgtggcaagaagcagctgcagcaggcacttccaaccaaatctgagactgaaaagttcggtgagaaggcctctgattggttcaacgatacttctgacaaggtcaccgagtacgcgtacaccgctcaggattttgtcggtgagaacaaggatgactggatcaagtccgcaaccgagactgctcacaaggtcgctgatactgtgagcgattacgctcacaaggctacctcttaccttgaggagaacagcggtgactggcttgaggctgcgcaggctaacgccaagactgctcgtaagtctgcagtgaaggctgccggcaaggctcaggaaaaggctaactttgctcttcaggtcgcagaggaaacctctggtcgcgccaacaagaaggcaactaagagctacgacaagcttcagaagcaggctgataaggccatcgatcgtgcacagaagaagctgaagggcatcgaactttaagtaacttcttcctgattgag

SEQ ID NO: 442 - protein, 304 aa, Corynebacterium glutamicum
MIRKLARPMLASVYVADGAETVLNTSAHVEGTQVVLDRIRYVLPRKYAKRISRDPELVTRVIGGTKVGAGSLLAIGRAPRTSAATLAILTIPNILARNAFWETQDADEKRNRRNGFLTNIALLGGLFITSVDTEGKPGVKWRATNATKRGKKQLQQALPTKSETEKFGEKASDWFNDTSDKVTEYAYTAQDFVGENKDDWIKSATETAHKVADTVSDYAHKATSYLEENSGDWLEAAQANAKTARKSAVKAAGKAQEKANFALQVAEETSGRANKKATKSYDKLQKQADKAIDRAQKKLKGIEL

SEQ ID NO: 443 - DNA, 530 bp, Corynebacterium glutamicum
  CDS (1)..(507): FRXA00943
aagcctggcgtgaagtggcgtgcaaccaatgctacaaagcgtggcaagaagcagctgcagcaggcactttcaaccaaatctgagactgaaaagttcggtgagaaggcctctgattggttcaacgatacttctgacaaggtcaccgagtacgcgtacaccgctcaggattttgtcggtgagaacaaggatgactggatcaagtccgcaaccgagactgctcacaaggtcgctgatactgtgagcgattacgctcacaaggctacctcttaccttgaggagaacagcggtgactggcttgaggctgcgcaggctaacgccaagactgctcgtaagtctgcagtgaaggctgccggcaaggctcacgaaaaggctaactttgctcttcaggtcgcagaggaaacctctggtcgcgccaacaagaaggcaactaagagctacgacaagcttcagaagcaggctgataaggccatcgatcgtgcacagaagaagctgaagggcatcgaactttaagtaacttcttcctgattgag

SEQ ID NO: 444 - protein, 169 aa, Corynebacterium glutamicum
KPGVKWRATNATKRGKKQLQQALSTKSETEKFGEKASDWFNDTSDKVTEYAYTAQDFVGENKDDWIKSATETAHKVADTVSDYAHKATSYLEENSGDWLEAAQANAKTARKSAVKAAGKAHEKANFALQVAEETSGRANKKATKSYDKLQKQADKAIDRAQKKLKGIEL

SEQ ID NO: 445 - DNA, 316 bp, Corynebacterium glutamicum
  CDS (101)..(316): FRXA02423
taggtacgatcggacgaggagaaaaaatctgaaaacaatccagtggcccacctcggcttataaaactggacaacagtattttgattggagcatcaccataatgatccgcaaacttgctcgaccaatgcttgcatcggtctacgtcgcagatggcgcagaaacagtattgaacaccagcgcacacgtcgaaggcactcaggtagttctggatcgtatccgttatgtgctgccccgtaagtacgcaaagcgcatttccagagatccagaattggtcacccgcgtcattggcggcaccaaagtctgtgcgggttcttgt

SEQ ID NO: 446 - protein, 72 aa, Corynebacterium glutamicum
MIRKLARPMLASVYVADGAETVLNTSAHVEGTQVVLDRIRYVLPRKYAKRISRDPELVTRVIGGTKVCAGSC

SEQ ID NO: 447 - DNA, 1095 bp, Corynebacterium glutamicum
  CDS (101)..(1072): RXN00945
tcacagtaccacccacaagccacaaggagggtatggaggtgggcgtctaaagccaaatttttcccggtgtttgaggcgattgcaccgtacactaatgtgcatgcttgaacgcctcaaacgcctagatccgctcattgtcctcattgtgctggctgtcattgtggcgatcatcattccagttcgcggggttgctgcggattggtttgatgtcgccgtcaagattgccattgcgctgctgttttttctttatggtgcccgcctatccacccaagaggcgctgaatggtctgaagcactggaggcttcacctgactattttggcgatcactttcggaatattcccacttatcggcattgggctcgagccgatgactgcatttgtgtcggaagatatttatcggggaattttgttcctcacgctcgttccgtccaccgtgcagtcatcggtggcgtttacctcgatcgctaaaggcaacgtagctggtgcgattgtgtcggcatcgctctccaaccttgcgggtgttttcctcactccgctgctggtcatgctcatcatgtctgcgggcgggggagttcacgtggattcccaggtcttcctcgacattgcgattcagcttctgctgccgttcatcctcggccaggtatgtaggcgttgggtgaagaattttgcggccaacaaagcaacaaaaatcgtggaccgcggctcgatcgcgatggtcgtgtactccgcgttttctgccggcatggtggctggcatttggtccactgtgagcgttctagagattatctacctcattgttttcgctattctgctggtgatggccatgctgtggttcacgctgttcatggctacacgccttggatttaaccgggcagattccatcgctattcagttctgcggaaccaagaaatccctggccacaggcctcccaatggcggcagtcatcttcggtggcgccaatatcggcctgctcatcttgccgttgatgatcttccaccaagtccagctgatgatttgtgcatggcttgcagctcgttatggtcgtgatgcgcaggaacagaaagccaacgcctaaaagtcctcagtagctagcca

SEQ ID NO: 448 - protein, 324 aa, Corynebacterium glutamicum
MLERLKRLDPLIVLIVLAVIVAIIIPVRGVAADWFDVAVKIAIALLFFLYGARLSTQEALNGLKHWRLHLTILAITFGIFPLIGIGLEPMTAFVSEDIYRGILFLTLVPSTVQSSVAFTSIAKGNVAGAIVSASLSNLAGVFLTPLLVMLIMSAGGGVHVDSQVFLDIAIQLLLPFILGQVCRRWVKNFAANKATKIVDRGSIAMVVYSAFSAGMVAGIWSTVSVLEIIYLIVFAILLVMAMLWFTLFMATRLGFNRADSIAIQFCGTKKSLATGLPMAAVIFGGANIGLLILPLMIFHQVQLMICAWLAARYGRDAQEQKANA

SEQ ID NO: 449 - DNA, 897 bp, Corynebacterium glutamicum
  CDS (101)..(874): RXN00946
gggccggtgtgaataaaacaccttccccaaatagacagcatggtctagattagcttgaaacgaaagcgtacattcgcagcaactaacggaaagcacactcatgactcacactctgcaggcaactaatccccttgatcaaaccgcttggcacgcttggcatttctcccgaaacaaagaggccatcagccgcaccggcgccaccagcctgagtgccacagagtggattagcgccaccacactcaaggacgcgcacacttttccttcacttcccgggcgatggtataaacgaggcggcggggtagtgggagcacatttaccaccagctttcgcaacaactggaacggtgcaactgcgccccggtgagctcttgatagcggaagatttcaccctcaccgtcattgaacggcttggacagtttgcacttcaggtttttgatgcacgcaatccgaagcgttttgaattccactccatcgcagctttcccaccgtccgaggaatggcggattgaggctcgcttcttcccggaacctgacactgttaacaccgctgcagctgatggagttatcgttgccacgcctactgcgggttgggtgcactttttgaagggccgtctggattaccgtcttcgtgtaaccgttcagaaaaataatctacgggcactatttagcgacaattcctcgacgttgggcgtttatcagcatcgttttgtcgacatcccacgccctgatgccgagggaaacaccatcattgatttcaaccgcgcttatcttcccccaaaggcattgaaccgaaagttcctgtgcccatcgcccagcctgaacaaccacctcaatctcaccgtggaggcaggggagaagtgggtggttgctggaggataatacttgctaaccgtcctaaa

SEQ ID NO: 450 - protein, 258 aa, Corynebacterium glutamicum
MTHTLQATNPLDQTAWHAWHFSRNKEAISRTGATSLSATEWISATTLKDAHTFPSLPGRWYKRGGGVVGAHLPPAFATTGTVQLRPGELLIAEDFTLTVIERLGQFALQVFDARNPKRFEFHSIAAFPPSEEWRIEARFFPEPDTVNTAAADGVIVATPTAGWVHFLKGRLDYRLRVTVQKNNLRALFSDNSSTLGVYQHRFVDIPRPDAEGNTIIDFNRAYLPPKALNRKFLCPSPSLNNHLNLTVEAGEKWVVAGG

SEQ ID NO: 451 - DNA, 897 bp, Corynebacterium glutamicum; identical to SEQ ID NO: 449
  CDS (101)..(874): FRXA00946

SEQ ID NO: 452 - protein, 258 aa, Corynebacterium glutamicum; identical to SEQ ID NO: 450

SEQ ID NO: 453 - DNA, 789 bp, Corynebacterium glutamicum
  CDS (14)..(766): RXN00953
cttgcattccccaatggcgccaccaacggtaggcaactacatcatgcagtccttcactcaaggtctgcagttcggcgttgcagttgccgtgattctctttggtgtccgcaccattcttggtgaactggtccccgcattccaaggtattgctgcgaaggttgttcccggagctatccccgcattggatgcaccgatcgtgttcccctacgcgcagaacgccgttctcattggtttcttgtcttccttcgtcggtggcttggttggcctgactgttcttgcatcgtggctgaacccagcttttggtgtcgcgttgattctgcctggtttggtcccccacttcttcactggtggcgcggcgggcgtttacggtaatgccacgggtggtcgtcgaggagcagtatttggcgcctttgccaacggtcttctgattaccttcctccctgctttcctgcttggtgtgcttggttccttcgggtcagagaacaccactttcggtgatgcggactttggttggttcggaatcgttgttggttctgcagccaaggtggaaggtgctggcgggctcatcttgttgctcatcatcgcagcggttcttctgggtggcgcgatggtcttccagaagcgcgtcgtgaatgggcactgggatccagctcccaaccgtgagcgcgtggagaaggcggaagctgatgccactccaacggctggggctcggacctaccctaagattgctcctccggcgggcgctcctaccccaccggctcgaagctaagatctccaaaaccctgagat

SEQ ID NO: 454 - protein, 251 aa, Corynebacterium glutamicum
MAPPTVGNYIMQSFTQGLQFGVAVAVILFGVRTILGELVPAFQGIAAKVVPGAIPALDAPIVFPYAQNAVLIGFLSSFVGGLVGLTVLASWLNPAFGVALILPGLVPHFFTGGAAGVYGNATGGRRGAVFGAFANGLLITFLPAFLLGVLGSFGSENTTFGDADFGWFGIVVGSAAKVEGAGGLILLLIIAAVLLGGAMVFQKRVVNGHWDPAPNRERVEKAEADATPTAGARTYPKIAPPAGAPTPPARS

SEQ ID NO: 455 - DNA, 579 bp, Corynebacterium glutamicum
  CDS (101)..(556): RXN00959
tttggaggcggagcatcataccttttaatgtcaggatcgtgcagtgaagaattcaggatgaattactcgctggaatattggtggggatagagttgttgttatgacggtgatcggaattattcttggcagcctttttggcgttcttgcagtccttctcatcgtggttggtgctttggggtgggcggctaagctccctggcaacccggttgtgggcattcgtgtccctgaggtgcgtaaatcccaagaattgtgggatatggcgcaccgtgtcgctggcccgttgtgggtgctgtcgggagtttcctttgttattgcatcgctagttgcgtttgttgcttctggttggatgtggcttgttgtggcgttgggtgttgaggctgccatcgcgttcattggtatgggtgcgggtatggctgcacatactgttgcgatggttgacgcgaagcgcattcgcgaaaccccgcaggcgcctgtttccgctgaaattgaagaggccggtggtgtgactattacctctgccgattatcaacaagactccgctgaatgcccccaagattgacttggatgcagtgcgtagag

SEQ ID NO: 456 - protein, 152 aa, Corynebacterium glutamicum
MTVIGIILGSLFGVLAVLLIVVGALGWAAKLPGNPVVGIRVPEVRKSQELWDMAHRVAGPLWVLSGVSFVIASLVAFVASGWMWLVVALGVEAAIAFIGMGAGMAAHTVAMVDAKRIRETPQAPVSAEIEEAGGVTITSADYQQDSAECPQD

SEQ ID NO: 457 - DNA, 427 bp, Corynebacterium glutamicum
  CDS (101)..(427): FRXA00959
tttggaggcggagcatcataccttttaatgtcaggatcgtgcagtgaagaattcaggatgaattactcgctggaatattggtggggatagagttgttgttatgacggtgatcggaattattcttggcagcctttttggcgttcttgcagtccttctcatcgtggttggtgctttggggtgggcggctaagctccctggcaacccggttgtgggcattcgtgtccctgaggtgcgtaaatcccaagaattgtgggatatggcgcaccgtgtcgctggcccgttgtgggtgctgtcgggagtttcctttgttattgcatcgctagttgcgtttgttgcttctggttggatgtggcttgttgtggcgttgggtgttgaggctgccatcgcgttcattggtatgggtgcgggtatggctgcgcatactggt

SEQ ID NO: 458 - protein, 109 aa, Corynebacterium glutamicum
MTVIGIILGSLFGVLAVLLIVVGALGWAAKLPGNPVVGIRVPEVRKSQELWDMAHRVAGPLWVLSGVSFVIASLVAFVASGWMWLVVALGVEAAIAFIGMGAGMAAHTG

SEQ ID NO: 459 - DNA, 960 bp, Corynebacterium glutamicum
  CDS (101)..(937): RXN00963
ctggctctgacggcgtcgacttgttctgcttctctgatacaccaattttcgaggcccttaacctcgcacgtacttttactccggaaggaatctagaacttatgcgtcttgcaacaatccgcaccaacggcaccaccattgctgctcgtgttgaatctgaaaacaccgctaccaccatcgagggctttgccaacgtcggtgaattactccaggaatccaactggcgcgagctggcagaaaacgctgctggtgaggctgtgacctttgaaaacaaggagctagatgcagtagttccagcacctaagaagattgtgtgcgtcggccttaactacgccaaccacattaaagaaatgggccgcgacctccctgataccccaaccctttttgttaagttccctgacgcgctcatcggacctttcgatgatgttgtcgttccagagtgggctaacaaggctctcgactgggaaggcgagatggcagttatcattggcaagcgcgcacgccgtgtcaagcaggccgatgctgctgagtacatcgctggctacgcagtgatgaacgattacaccacccgcgatttccagtacgcagcacctgcaaagactccacagtggcaccagggcaagtctttggaaaagtccgctggcttcgggccttggatgactaccccagattcttttgagttcggcggcgagctggcaacctacctcgagggcgagaaggtacagtccacccctaccaatgacctggtctttagcccagaaaagctcatcgaatacatcacccacatctacccattggatgctggcgacgtcattgtcaccggtaccccaggcggcgttggccacgcacgtaacccacagcgctacatcggtgacggcgaaaccgtaaaggttgagattgcgggcctcggcttcattgaaaacaagacggtgtttgaataaatgacaactttccacgatct

SEQ ID NO: 460 - protein, 279 aa, Corynebacterium glutamicum
MRLATIRTNGTTIAARVESENTATTIEGFANVGELLQESNWRELAENAAGEAVTFENKELDAVVPAPKKIVCVGLNYANHIKEMGRDLPDTPTLFVKFPDALIGPFDDVVVPEWANKALDWEGEMAVIIGKRARRVKQADAAEYIAGYAVMNDYTTRDFQYAAPAKTPQWHQGKSLEKSAGFGPWMTTPDSFEFGGELATYLEGEKVQSTPTNDLVFSPEKLIEYITHIYPLDAGDVIVTGTPGGVGHARNPQRYIGDGETVKVEIAGLGFIENKTVFE

SEQ ID NO: 461 - DNA, 538 bp, Corynebacterium glutamicum
  CDS (101)..(538): FRXA00963
ctggctctgacggcgtcgacttgttctgcttctctgatacaccaattttcgaggcccttaacctcgcacgtacttttactccggaaggaatctagaacttatgcgtcttgcaacaatccgcaccaacggcaccaccattgctgctcgtgttgaatctgaaaacaccgctaccaccatcgagggctttgccaacgtcggtgaattactccaggaatccaactggcgcgagctggcagaaaacgctgctggtgaggctgtgacctttgaaaacaaggagctagatgcagtagttccagcacctaagaagattgtgtgcgtcggccttaactacgccaaccacattaaagaaatgggccgcgacctccctgataccccaaccctttttgttaagttccctgacgcgctcatcggacctttcgatgatgttgtcgttccagagtgggctaacaaggctctcgactgggaaggcgagatggcagttatcattggcaagcgcgcacgccgtgtcaagcaggccgatgctgctgagtacatcgct

SEQ ID NO: 462 - protein, 146 aa, Corynebacterium glutamicum
MRLATIRTNGTTIAARVESENTATTIEGFANVGELLQESNWRELAENAAGEAVTFENKELDAVVPAPKKIVCVGLNYANHIKEMGRDLPDTPTLFVKFPDALIGPFDDVVVPEWANKALDWEGEMAVIIGKRARRVKQADAAEYIA

SEQ ID NO: 463 - DNA, 341 bp, Corynebacterium glutamicum
  CDS (1)..(318): RXN00971
aaagcactttccatcggaacccagtgggcacaagtcatgggcattaaccacgccgaagccgaagaactcgacgaagccctctccccgctcattaaccgcctccgcgaaatgggctttgaccccaccgaaaccgaagaagcaaactccctcgctctacacagctgcccatttgtggtcaacgacaaacgcccatcagccttcgtctgcgccatccacgccggattcatccaagaaagcctcggtgaaaacaaccgcatccagctggaactcaaaccactcaacgcgccgggcacctgtaaggttcacgtgttcagcgaataattgctgcactaataaggccc

SEQ ID NO: 464 - protein, 106 aa, Corynebacterium glutamicum
KALSIGTQWAQVMGINHAEAEELDEALSPLINRLREMGFDPTETEEANSLALHSCPFVVNDKRPSAFVCAIHAGFIQESLGENNRIQLELKPLNAPGTCKVHVFSE

SEQ ID NO: 465 - DNA, 296 bp, Corynebacterium glutamicum
  CDS (1)..(273): FRXA00971
aaccacgccgaagccgaagaactcgacgaagccctctccccgctcattaaccgcctccgcgaaatgggctttgaccccaccgaaaccgaagaagcaaactccctcgctctacacagctgcccatttgtggtcaacgacaaacgcccatcagccttcgtctgcgccatccacgccggattcatccaagaaagcctcggtgaaaacaaccgcatccagctggaactcaaaccactcaacgcgccgggcacctgtaaggttcacgtgttcagcgaataattgctgcactaataaggccc

SEQ ID NO: 466 - protein, 91 aa, Corynebacterium glutamicum
NHAEAEELDEALSPLINRLREMGFDPTETEEANSLALHSCPFVVNDKRPSAFVCAIHAGFIQESLGENNRIQLELKPLNAPGTCKVHVFSE

SEQ ID NO: 467 - DNA, 1503 bp, Corynebacterium glutamicum
  CDS (101)..(1480): RXN00991
acttcaaggaaagacggtcccaagagctaaaactcccccacggcacgcgaagctgaacaggctttcaccgcttctaagggcaacagcttaaaccacgctaatggacatactcataagcatcctctcactgctaggcttcgtgcttcttaccgcgagcaccggactattcgtggccattgagttcgcactcaccggcttagaaaaatccactgtagaaacacatgtgaagcaaaaaggcgacagcagcgcccgcgcagtgcagagggatcatcaaaatctgtcgttcgtgctctctggtgcccagctgggcatcacgatcacgacacttgccacaggcttcctcgcagagccggttttggccaaattcttcaccccagcacttgagctggtgggattaaatgaatcagcaagctccgcagtagccctcatcatcgcactgttggtggcaactaccctctccatggtttttggtgagttggttcccaaaaactgggcgatcaccaacccgttgggcgtggcacgttttgttgtccaccctgtcaattggttcaacatggttctcaagccgtttattaacggcatgaacaagtctgcaaactttattgtccgcaaacttggtattgaaccagccgaagagcttgcctctgcccgttcctcccaagagctcaccgccttggtacgcagctccgcggaaagcggcggactggatcaaaacaccgcagcggtgatcaaccgatccctgcagttcggtgacgccaccgctgatgaattcatgacacctcgctccaccattgaatcattgcgtgccacagacaccgtcaatgatttgatcgagcttgccctggaaacgggtcactcccgcttcccagtcaccgaaggcgacttggatgaaaccatcggcatggtccacatcaaggacgcattctctgtagtgcaggcagaacgcgccaccaccatggtgcgcgatctagcccgcaaaattcctgtggtaccagccagccttgacggcgactctgtcctcaacgctgtccgctccgccggctcccaagttattttggttgccgatgaatacggcggaaccgcaggcatggtcaccatcgaagacgtcgtggaggaaatcctcggcgaaatccacgatgagcacgacgactccgacgccgaacgcgatttccaacaattcggcgccagctgggaagtctccggcctggtccgcatcgatgaactcgaaaaacgcgtcgggtacgtctcccctgacggcccctacgaaaccctcggcggcttgatcatgtacacagtcggcgccattcctcgcgtcggcgatgtcgccctactcccactgaccgataccccaaccatggatgaattcgaatccggcttctccggacgctggatcgcacgagtaacggtcatggaagatcgacgcatcgacaaagccgttctcacccccatcacccatgaagaagcaaaggagtacgaaaagtgagtatttgggcaactgtcctt

SEQ ID NO: 468 - protein, 460 aa, Corynebacterium glutamicum
MDILISILSLLGFVLLTASTGLFVAIEFALTGLEKSTVETHVKQKGDSSARAVQRDHQNLSFVLSGAQLGITITTLATGFLAEPVLAKFFTPALELVGLNESASSAVALIIALLVATTLSMVFGELVPKNWAITNPLGVARFVVHPVNWFNMVLKPFINGMNKSANFIVRKLGIEPAEELASARSSQELTALVRSSAESGGLDQNTAAVINRSLQFGDATADEFMTPRSTIESLRATDTVNDLIELALETGHSRFPVTEGDLDETIGMVHIKDAFSVVQAERATTMVRDLARKIPVVPASLDGDSVLNAVRSAGSQVILVADEYGGTAGMVTIEDVVEEILGEIHDEHDDSDAERDFQQFGASWEVSGLVRIDELEKRVGYVSPDGPYETLGGLIMYTVGAIPRVGDVALLPLTDTPTMDEFESGFSGRWIARVTVMEDRRIDKAVLTPITHEEAKEYEK

SEQ ID NO: 469 - DNA, 1185 bp, Corynebacterium glutamicum
  CDS (101)..(1162): RXN01004
ccggacgctggatcgcacgagtaacggtcatggaagatcgacgcatcgacaaagccgttctcacccccatcacccatgaagaagcaaaggagtacgaaaagtgagtatttgggcaactgtccttctaattatcgtccttctttccgccaacgccttcttcgtggccgcggagttcgcactgatttcctcgcgccgggaccgcctggattccctggtatcccagggtaaaaagggagctgaaaaggttctctacgcaaccgagcacctctccatcatgttggcgggcgctcagttcggtattacggtctgttctctgattctgggtaaagtcgcagaacctgcgatcgcccacttcattgaggtgcctttcacctcctggggtgttccaaatgatttgatccacccaatttccttcgtcatcgcactggcgatcatcacctggttgcacattctctttggtgaaatggtgccaaagaacatcgctattgctggccctgaaaccttaggcatgtggcttgctccagtgctcattgcgtttgtgaagattacccgcccgttgatcgagttcatgaactggatcgcccgtctgacccttcgcgcctttggtgtggagcaaaaaaacgagctggattccaccgtggacccagagcagctggcatcaatgatttccgagtcccgttccgaaggcctccttgatgctgaagagcacgcccgcctgtccaaggcgctgcgctctgagcagcgttccatcaaggaactggtgattaaggatgaggacgtgcgcacgctggcgttcggtaaatctggcccgaccttgcaccagttggaggaagcagtccgcgagaccggtttctcccgcttccctgtcaccggccgcgatggatcctacttgggttatatccacatcaaggatattttgcctcgtctggctgatcctgagatggatccctccgagaccattccgcgttctgcactgcgccctttgagcaatgtggatgccgacggcctcatggatgacgtcttggattttatgcactaccgctccgcgcacatggctcaggttcgcctcaaaggtgagcttctcggcgtgattacgctggaggatctcatcgaagaatacgtgggcaccgtcaacgattggactcacgaaagctccgacgactagaaatagtaactgtgttggac

SEQ ID NO: 470 - protein, 354 aa, Corynebacterium glutamicum
VSIWATVLLIIVLLSANAFFVAAEFALISSRRDRLDSLVSQGKKGAEKVLYATEHLSIMLAGAQFGITVCSLILGKVAEPAIAHFIEVPFTSWGVPNDLIHPISFVIALAIITWLHILFGEMVPKNIAIAGPETLGMWLAPVLIAFVKITRPLIEFMNWIARLTLRAFGVEQKNELDSTVDPEQLASMISESRSEGLLDAEEHARLSKALRSEQRSIKELVIKDEDVRTLAFGKSGPTLHQLEEAVRETGFSRFPVTGRDGSYLGYIHIKDILPRLADPEMDPSETIPRSALRPLSNVDADGLMDDVLDFMHYRSAHMAQVRLKGELLGVITLEDLIEEYVGTVNDWTHESSDD

SEQ ID NO: 471 - DNA, 771 bp, Corynebacterium glutamicum
  CDS (101)..(748): RXN01016
tgcccgtcgaggtgaacgcccaagaatagttctctttcgtcgacttctcacgttgataccgctcggcatcatccaccaaattctccagccgggtgaagcattgttgccgtatgcaatagtcggcctggtcattttgctgccatcctcctggttgcctcgttgggctgtcgcagtccttggcgaagtgtcgcttgtgccagcggtggttttcggtggcgggttcctgcttatcccctcaatgttcctgatcggttcagcgctcgttaggtatggagtagtcgatcgggcagagaacgcaccgcgggctatgggagtctttttcgccgtaagcgcagcaatcgctatacctacgctgatcatccaggcacgtgacatcacttcttcaggcttctcgatcgtttccacagtggcgggactcgcgcttggcggcgtctacatttctttagtgttgctggccttgcatacaccgattcgcggtgcactcgctgcagttttcgcacctttagggcgtatggcgctaaccaactacattggtgcaacgatcctcatgctcattggcgggctaatcgtggatcttccacacagcacatcatggacagctacggtgctcctagctgcgggtattctcattattcaagagctactttctgctttatggttgcgccactacacacaggggccacttgggtatctatggcgttgggtgacttggggaagccgttcccccttccttacccgttccgcatcatgacaggtacggaagtgtcctac

SEQ ID NO: 472 - protein, 216 aa, Corynebacterium glutamicum
LLPYAIVGLVILLPSSWLPRWAVAVLGEVSLVPAVVFGGGFLLIPSMFLIGSALVRYGVVDRAENAPRAMGVFFAVSAAIAIPTLIIQARDITSSGFSIVSTVAGLALGGVYISLVLLALHTPIRGALAAVFAPLGRMALTNYIGATILMLIGGLIVDLPHSTSWTATVLLAAGILIIQELLSALWLRHYTQGPLGYLWRWVTWGSRSPFLTRSAS

SEQ ID NO: 473 - DNA, 771 bp, Corynebacterium glutamicum; identical to SEQ ID NO: 471
  CDS (101)..(748): FRXA01016

SEQ ID NO: 474 - protein, 216 aa, Corynebacterium glutamicum; identical to SEQ ID NO: 472

SEQ ID NO: 475 - DNA, 1101 bp, Corynebacterium glutamicum
  CDS (101)..(1078): RXN01023
aagcgaatccgggaatgaaagtgagtgcgccaaagtcaactccttggttcaagtgtcagtatttttctagtctatcgccccacaggtaggctcaggacacatgagtgccgtgaacagtgctggtcgcccagccaacgggggaattaacaaaacccccatgattattgccctagtgttatctattgtgttggttttggcggtgctgttcggcgcccgagtcctccttggccccgccggccagcaacagatagccatgagtgggcttcccgccccagacgcagaatctgctgagtgcgccgcattactcgaggatctccccggcgaggccttcgggcacacccgtgcagaaatcatggatcctgttccaccgggcgctgccgcctggtccacctcagacctcgagcgtgtgacgctgcgttgtggcgtcgatatgccattccagtacaccgcgctcgccaacaccgtcgacgtcgacggcaccacctggctacctgtctccgacatgacccccggctcctccctggagacctggtactccgtcaaccgcttccccgtcgtcgccatcaccgccgatgacatcagcaccgacagcgccgacaaccccgtcgcccccttcagcagcgccgtcgacaagctagaaaagcgcgacggccagcccttcgacgccccacttaccggcttgagctcagccggcaccacatgcacttcgcttttcgacgccctcccccgccaactcgaagtcggcggcgacgacggcacaacgtacgaacgcatcgaggaggaccgcatgcaggccgccggatactccgacgacgcagtcgcgtgggacacgccgggattagaacccattgtgatccgttgcggcgtggagccttctgagaactacgcagccggtgccatgttgcagcagatcgatgacatcccgtggttcgaggacaccattttggcctccggtaccacctcgtctacctggtatgcccttggacgcgagatcgacatcgccgtgtctctgcctcaggctgcttcctcttccctgattactatctccggtttcattgaagacacggttcctgcggaataagacataaaaaatcgccccac

SEQ ID NO: 476 - protein, 326 aa, Corynebacterium glutamicum
MSAVNSAGRPANGGINKTPMIIALVLSIVLVLAVLFGARVLLGPAGQQQIAMSGLPAPDAESAECAALLEDLPGEAFGHTRAEIMDPVPPGAAAWSTSDLERVTLRCGVDMPFQYTALANTVDVDGTTWLPVSDMTPGSSLETWYSVNRFPVVAITADDISTDSADNPVAPFSSAVDKLEKRDGQPFDAPLTGLSSAGTTCTSLFDALPRQLEVGGDDGTTYERIEEDRMQAAGYSDDAVAWDTPGLEPIVIRCGVEPSENYAAGAMLQQIDDIPWFEDTILASGTTSSTWYALGREIDIAVSLPQAASSSLITISGFIEDTVPAE

SEQ ID NO: 477 - DNA, 974 bp, Corynebacterium glutamicum
  CDS (1)..(951): FRXA01023
ccagccaacgggggaattaacaaaacccccatgattattgccctagtgttatctattgtgttggttttggcggtgctgttcggcgcccgagtcctccttggccccgccggccagcaacagatagccatgagtgggcttcccgccccagacgcagaatctgctgagtgcgccgcattactcgaggatctccccggcgaggccttcgggcacacccgtgcagaaatcatggatcctgttccaccgggcgctgccgcctggtccacctcagacctcgagcgtgtgacgctgcgttgtggcgtcgatatgccattccagtacaccgcgctcgccaacaccgtcgacgtcgacggcaccacctggctacctgtctccgacatgacccccggctcctccctggagacctggtactccgtcaaccgcttccccgtcgtcgccatcaccgccgatgacatcagcaccgacagcgccgacaaccccgtcgaccccttcagcagcgccgtcgacaagctagaaaagcgcgacggccagcccttcgacgccccacttaccggcttgagctcagccggcaccacatgcacttcgcttttcgacgccctcccccgccaactcgaagtcggcggcgacgacggcacaacgtacgaacgcatcgaggaggaccgcatgcaggccgccggatactccgacgacgcagtcgcgtgggacacgccgggattagaacccattgtgatccgttgcggcgtggagccttctgagaactacgcagccggtgccatgttgcagcagatcgatgacatcccgtggttcgaggacaccattttggcctccggtaccacctcgtctacctggtatgcccttggacgcgagatcgacatcgccgtgtctctgcctcaggctgcttcctcttccctgattactatctccggtttcattgaagacacggttcctgcggaataagacataaaaaatcgccccac

SEQ ID NO: 478 - protein, 317 aa, Corynebacterium glutamicum
PANGGINKTPMIIALVLSIVLVLAVLFGARVLLGPAGQQQIAMSGLPAPDAESAECAALLEDLPGEAFGHTRAEIMDPVPPGAAAWSTSDLERVTLRCGVDMPFQYTALANTVDVDGTTWLPVSDMTPGSSLETWYSVNRFPVVAITADDISTDSADNPVDPFSSAVDKLEKRDGQPFDAPLTGLSSAGTTCTSLFDALPRQLEVGGDDGTTYERIEEDRMQAAGYSDDAVAWDTPGLEPIVIRCGVEPSENYAAGAMLQQIDDIPWFEDTILASGTTSSTWYALGREIDIAVSLPQAASSSLITISGFIEDTVPAE

SEQ ID NO: 479 - DNA, 2172 bp, Corynebacterium glutamicum
  CDS (101)..(2149): RXN01028
cgcaagcagctgcactatattcaggcattttaccgtgcctgggacccatcaacgccgcttcaatgacgctgacccagcggtgacccatccgcatctcacagtgatctacccaccgctcacccctgcatccgaagagaaattcaacaagatcacctcagtcgctgctgtgagcaagcgcccaaccaccctgccgtatttccgtgcagatggttcacctactcgtggctttgctaacttctccacaggaggtattcacggtgcggaatacaacgaagatcgttttgaccatgatcaagatctacacacagtggcaacccgtgaattcttcgccattcttgatgcgacattagcggctctctacgcagcccaccaagccgaacctgaatcggcggactaccagattgcacaagacgcactcgcctgggcaaagaatgtacttagcgatcaaaaactcatcgctaagtcgcctcagttatacaaccccgaaaccggggtcacctatgagtgggagtttgtcgctcaagcagcatggtggattcgcaacaaaccggttgaggttattttaccaacaggtgaatcaatgaccgtaaaacacaaatctgtattggcatctgcgtcctacccactccgagacaacgtggcgtactggcgtagcgaacccaaaacaccacagctgtttcccgtagcaaaatctggtggttcctcgcttgagaagaagtacaactacacctctgtgggtactgctattcacgaggactttagcagttactatccgctcttgctcaccaatatggctgcatttaccaatgctgacttaggtattgatgagaaaaccgggcgccctcgtgaccgctaccgtgaaatctacgaacaaaaagagatctatggcgcacagcgcaaagacccctccattgatgaagaaacaaagcaacgtctagggattttgcgcgaaggtaccaagttgattcttaactcggccaccggtgctgctgatgctggtcacgacaccccgatcctcatgaacaatcgcgttattgccatgaggattattgggcagctattttcttggagaattgggcaagctcaatcactggctggtgcaacgattatttccactaacactgatggcctgtattccgtactcgatatggggactaaccagcgcgttcttgatgaacacgctacagccatcggtgtgcaaattgagcctgaagaactggatattgtctccaaggattccaactcacgtgccgaatttctcggcaatggctacatcaatgcggccggtgacttggcgtgttgggatggacccaactctcggaactcactagatcacccggcctttgttgaccatgtgctggtgaagtatttccagctcgtcgtcaacaacactgtgccagagattccagaaacacctgagcttgagggtgtaccgctggctcttgatcaacccatgaaccgccacgaagtctcgaagattgtcgccactatgcacaaggaattcgagccgaaaaagctgctgtcgttttaccaaaacattttggcctcttcacgcggttctaataccttcctattctctgtcccctatatccctgcaacagaaggagaagaaacccaccctgcaacagataccagcactattgcgacaccaaccttgagctttgatgcttatggtaataaggccgaggtcatgccgactcaatccactgtggataagcgcgtgccctctttgctgcagtattacacgcgtacattccatgtgcgacaagatacgcagcaggctgtctttgatgttattggcgccaaccccgtgctcatcgccgcagcaaaagctgcatccatatcaccggcttctgctgattcacgtagaaagaagggcctggcctccaccaacgctgacccagtagccaagcatgtactagaaattgcaggagctgatgtggaatcgctgcgccatgaaaaggatctcaaggtcaccaagcacactggccaagacccagcactgcctgtcgtggtctttaaccaaaccatttggcataaccccaacgacgatgtgattaatgcattactgggcgctattgaccaggatgcctacattgacatggcgatctcgtcctacaacaagtcctggcacaacattatcccggcttaactaccgctgggtagacccct

SEQ ID NO: 480 - protein, 683 aa, Corynebacterium glutamicum
VIYPPLTPASEEKFNKITSVAAVSKRPTTLPYFRADGSPTRGFANFSTGGIHGAEYNEDRFDHDQDLHTVATREFFAILDATLAALYAAHQAEPESADYQIAQDALAWAKNVLSDQKLIAKSPQLYNPETGVTYEWEFVAQAAWWIRNKPVEVILPTGESMTVKHKSVLASASYPLRDNVAYWRSEPKTPQLFPVAKSGGSSLEKKYNYTSVGTAIHEDFSSYYPLLLTNMAAFTNADLGIDEKTGRPRDRYREIYEQKEIYGAQRKDPSIDEETKQRLGILREGTKLILNSATGAADAGHDTPILMNNRVIAMRIIGQLFSWRIGQAQSLAGATIISTNTDGLYSVLDMGTNQRVLDEHATAIGVQIEPEELDIVSKDSNSRAEFLGNGYINAAGDLACWDGPNSRNSLDHPAFVDHVLVKYFQLVVNNTVPEIPETPELEGVPLALDQPMNRHEVSKIVATMHKEFEPKKLLSFYQNILASSRGSNTFLFSVPYIPATEGEETHPATDTSTIATPTLSFDAYGNKAEVMPTQSTVDKRVPSLLQYYTRTFHVRQDTQQAVFDVIGANPVLIAAAKAASISPASADSRRKKGLASTNADPVAKHVLEIAGADVESLRHEKDLKVTKHTGQDPALPVVVFNQTIWHNPNDDVINALLGAIDQDAYIDMAISSYNKSWHNIIPA

SEQ ID NO: 481 - DNA, 647 bp, Corynebacterium glutamicum
  CDS (1)..(624): FRXA01028
ttttaccaaaacattttggcctcttcacgcggttctaataccttcctattctctgtcccctatatccctgcaacagaaggagaagaaacccaccctgcaacagataccagcactattgcgacaccaaccttgagctttgatgcttatggtaataaggccgaggtcatgccgactcaatccactgtggataagcgcgtgccctctttgctgcagtattacacgcgtacattccatgtgcgacaagatacgcagcaggctgtctttgatgttattggcgccaaccccgtgctcatcgccgcagcaaaagctgcatccatatcaccggcttctgctgattcacgtagaaagaagggcctggcctccaccaacgctgacccagtagccaagcatgtactagaaattgcaggagctgatgtggaatcgctgcgccatgaaaaggatctcaaggtcaccaagcacactggccaagacccagcactgcctgtcgtggtctttaaccaaaccatttggcataaccccaacgacgatgtgattaatgcattactgggcgctattgaccaggatgcctacattgacatggcgatctcgtcctacaacaagtcctggcacaacattatcccggcttaactaccgctgggtagacccct

SEQ ID NO: 482 - protein, 208 aa, Corynebacterium glutamicum
FYQNILASSRGSNTFLFSVPYIPATEGEETHPATDTSTIATPTLSFDAYGNKAEVMPTQSTVDKRVPSLLQYYTRTFHVRQDTQQAVFDVIGANPVLIAAAKAASISPASADSRRKKGLASTNADPVAKHVLEIAGADVESLRHEKDLKVTKHTGQDPALPVVVFNQTIWHNPNDDVINALLGAIDQDAYIDMAISSYNKSWHNIIPA

SEQ ID NO: 483 - DNA, 1230 bp, Corynebacterium glutamicum
  CDS (1)..(1230): FRXA01812
agcttcaatgacgttgacccagcggtgacccatccgcatctcacagtgatctacccaccgctcacccctgcatccgaagagaaattcaacaagatcacctcagtcgctgctgtgagcaagcgcccaaccaccctgccgtatttccgtgcagatggttcacctactcgtggctttgctaacttctccacaggaggtattcacggtgcggaatacaacgaagatcgttttgaccatgatcaagatctacacacagtggcaacccgtgaattcttcgccattcttgatgcgacattagcggctctctacgcagcccaccaagccgaacctgaatcggcggactaccagattgcacaagacgcactcgcctgggcaaagaatgtacttagcgatcaaaaactcatcgctaagtcgcctcagttatacaaccccgaaaccggggtcacctatgagtgggagtttgtcgctcaagcagcatggtggattcgcaacaaaccggttgaggttattttaccaacaggtgaatcaatgaccgtaaaacacaaatctgtattggcatctgcgtcctacccactccgagacaacgtggcgtactggcgtagcgaacccaaaacaccacagctgtttcccgtagcaaaatctggtggttcctcgcttgagaagaagtacaactacacctctgtgggtactgctattcacgaggactttagcagttactatccgctcttgctcaccaatatggctgcatttaccaatgctgacttaggtattgatgagaaaaccgggcgccctcgtgaccgctaccgtgaaatctacgaacaaaaagagatctatggcgcacagcgcaaagacccctccattgatgaagaaacaaagcaacgtctagggattttgcgcgaaggtaccaagttgattcttaactcggccaccggtgctgctgatgctggtcacgacaccccgatcctcatgaacaatcgcgttattgccatgaggattattgggcagctattttcttggagaattgggcaagctcaatcactggctggtgcaacgattatttccactaacactgatggcctgtattccgtactcgatatggggactaaccagcgcgttcttgatgaacacgctacagccatcggtgtgcaaattgagcctgaagaactggatattgtctccaaggattccaactcacgtgccgaatttctcggcaatggctacatcaatgcggcc

SEQ ID NO: 484 - protein, 410 aa, Corynebacterium glutamicum
SFNDVDPAVTHPHLTVIYPPLTPASEEKFNKITSVAAVSKRPTTLPYFRADGSPTRGFANFSTGGIHGAEYNEDRFDHDQDLHTVATREFFAILDATLAALYAAHQAEPESADYQIAQDALAWAKNVLSDQKLIAKSPQLYNPETGVTYEWEFVAQAAWWIRNKPVEVILPTGESMTVKHKSVLASASYPLRDNVAYWRSEPKTPQLFPVAKSGGSSLEKKYNYTSVGTAIHEDFSSYYPLLLTNMAAFTNADLGIDEKTGRPRDRYREIYEQKEIYGAQRKDPSIDEETKQRLGILREGTKLILNSATGAADAGHDTPILMNNRVIAMRIIGQLFSWRIGQAQSLAGATIISTNTDGLYSVLDMGTNQRVLDEHATAIGVQIEPEELDIVSKDSNSRAEFLGNGYINAA

SEQ ID NO: 485 - DNA, 837 bp, Corynebacterium glutamicum
  CDS (101)..(814): RXN01069
tcctaagctctcttgagtacctgagaccttctcagcaaaacacaaagtgccttcacccaacctggggtggaggcactttctcattgctaaggtgtgcatcgtgaacgatttaccgaacctaccaaagctgcccttcaactggacatgggtgctggcaactgttgccacgacagtggtgttggcgggtattggtttgtatgtgtattacccgtcgttgccagatcctatgccggtgcattggaatggatccggggaggcggataattggacgcctaaatcggtgggttcgtttctttcactgattttgatagggccaggcattattttgctgaccctgtcgggtatgcaggcgttgctgaccatgcagtctggagtgatcacgcaacgcggtggggcgaaatcggcgaatgaagcgcaccggcagtgggaaacctacaaggcaacaagcatgcacatgggttggtacatgtttgtgctcaacgctttgattttggtgatgatcctcaatgagttccgcccaaaccctctgcctggtggatttatcatcgggcttattggaattattgctgccacgattgtcctgttggttctgattggaaaaacaaccacgagtttggcaaagaaataccccatgcctgaccaagatggaaagacgtgggggattttctacaacgatccggacgataatcggatcttagtggacaccgggatggggatgaattacacgtttaacattgcccatacgtggggcaagatcttcgcggttttgatcttcgcggtgccagtactcatcgttttattaaccgttctcctttaacctcgatccaccgatgtgcc

SEQ ID NO: 486 - protein, 238 aa, Corynebacterium glutamicum
VNDLPNLPKLPFNWTWVLATVATTVVLAGIGLYVYYPSLPDPMPVHWNGSGEADNWTPKSVGSFLSLILIGPGIILLTLSGMQALLTMQSGVITQRGGAKSANEAHRQWETYKATSMHMGWYMFVLNALILVMILNEFRPNPLPGGFIIGLIGIIAATIVLLVLIGKTTTSLAKKYPMPDQDGKTWGIFYNDPDDNRILVDTGMGMNYTFNIAHTWGKIFAVLIFAVPVLIVLLTVLL

SEQ ID NO: 487 - DNA, 703 bp, Corynebacterium glutamicum
  CDS (101)..(703): FRXA01069
tcctaagctctcttgagtacctgagaccttctcagcaaaacacaaagtgccttcacccaacctggggtggaggcactttctcattgctaaggtgtgcatcgtgaacgatttaccgaacctaccaaagctgcccttcaactggacatgggtgctggcaactgttgccacgacagtggtgttggcgggtattggtttgtatgtgtattacccgtcgttgccagatcctatgccggtgcattggaatggatccggggaggcggataattggacgcctaaatcggtgggttcgtttctttcactgattttgatagggccaggcattattttgctgaccctgtcgggtatgcaggcgttgctgaccatgcagtctggagtgatcacgcaacgcggtggggcgaaatcggcgaatgaagcgcaccggcagtgggaaacctacaaggcaacaagcatgcacatgggttggtacatgtttgtgctcaacgctttgattttggtgatgatcctcaatgagttccgcccaaaccctctgcctggtggatttatcatcgggcttattggaattattgctgccacgattgtcctgttggttctgattggaaaaacaaccacgagtttggcaaagaaataccccatgcctgaccaagatggaaagacgtgggggattttctacaacgatccggacgataatcggatcttagtggac

SEQ ID NO: 488 - protein, 201 aa, Corynebacterium glutamicum
VNDLPNLPKLPFNWTWVLATVATTVVLAGIGLYVYYPSLPDPMPVHWNGSGEADNWTPKSVGSFLSLILIGPGIILLTLSGMQALLTMQSGVITQRGGAKSANEAHRQWETYKATSMHMGWYMFVLNALILVMILNEFRPNPLPGGFIIGLIGIIAATIVLLVLIGKTTTSLAKKYPMPDQDGKTWGIFYNDPDDNRILVD

SEQ ID NO: 489 - DNA, 2187 bp, Corynebacterium glutamicum
  CDS (101)..(2164): RXN01071
cacctgaattggctgagggagaggcaccgactggcaccgaagaggtgcttgcctcgaaggcgggcgctgaggcgaatggcctggagtaggggaccagatcttggtcgtggactccagtggccgctacaacgtcaccatcacaggcctgaccaccactgagacggattcggccaccgcgctgaacctgcagatgtcggaagctggctacctggagcgttacaccgacggggctaccgtccccagcgtcatgctgtcggctgcagatggcaccacgcctcaagagcttgtcgacgccctcgctgccgaacttggatcgaactttgatgtagaaaccggcgaagcgctagtcgagcaggctacaggaatgatcacgcaggccttgagcttcgtgcagtacttcctcgttgccttcggtctcattgcactgctggttggtaccttcatcatcgcgaataccttctccatgattgtggctcagcgcatgcgtgagttcgctctcctgcgagccctgggtgcggcgccaggacagatcactcgctctgtggtgctggaagcaaccatcgttggcctcttcggctctgctcttggtgtgctgggtggtatgggcctcgtagcgatcatttcagctgtcctcaataacctgggcatgccgatgggatccagcgttggcttgactccttctgcagtggttaccgcgctcgtattgggcaccgttgtcaccattgtgagcgcgtgggctccggctcgtcgtgcaggtgaggttaagcctgttgaagcgatgcgcaacatggaaaccaccactatgcgttccatgatggggcgcacgatcaccggtggcatcgttctagcactcggcatcatctttgcgattgccggtgcgatgatgactgattcttccaccgctactcgttccatcctggtgggcattggtgcactgtttgtcatcgtgggtacgttcctcttctcaccagcgctctccatgcctgtggtgggtggcctgggcaaggttatcggtgcaccgtttggcagcgttggaagccttgctgcgaccaactccaagcgaaaccctcgccgtaccgcaactacagcgttcgcactgacgttgggcattgccttagtgactgcaattggcatgctttctgcaaccatgaaggacgcagtctccgacatgatggcggagcagtacaccgcagattacatcctgcagggaccaaccaacggttccatcaccatgccgaaggaatctgtcaatgatgttcgcgatgctgagggcgttgccgatgtcgtgctcgtttccatgaactctgcctcggtgaacggtcaggcttcatacagccagctgggccagtctgtaacctttgtcgctgacggcgacctgagcaaggtcatcagcacagaaagcattgatggctccctcgacttgagcaacccaggtgttgtgactaaccagacgtttgctgatgaaaacggctgggcagtaggcgatactctgcagcttgaatcaatggggcagaccatcggcgatatcgagttgatcggtaccttcaccggaaacgacgccatcggaaatatgatcatctccgaaagttccttggctgatacaccagcggcagacactgctgttcctcagatgatgctggtggtaggcgaagaaggctttgataaggaacaactgcgcaccaacttggaagacgcagtcgctgattacattgtcatctctgtgaaatcagcaaccgagttcgctggtgaaacggttgcgatgatcgacaccatgatgaacattctgtacgcgctgcttgctctgtctgtcattgttgccatcatcggcatcatcaacaccctggcactgaatgtgatcgagcgtcgccaggagatcggtatgctccgcgcagttggcgtgaagcgcggacaggtccgcaccatgatcaccttagaatctgttcagatcgccatctacggtgctgtgattggtatcgcgattggtcttggtctgggctgggcctttgtgacagtgatgtcaggcgaaggactagacgctgcggttagtatcccgtggggtcaggtcggactgatgcttgttggttccgctgtagtcggtgttatcgccgcgctgtggccggcagtcaaggcatctaggacaccacctttggatgcgattaccgactagttttagcggcagttgaatca

SEQ ID NO: 490 - protein, 688 aa, Corynebacterium glutamicum
LVVDSSGRYNVTITGLTTTETDSATALNLQMSEAGYLERYTDGATVPSVMLSAADGTTPQELVDALAAELGSNFDVETGEALVEQATGMITQALSFVQYFLVAFGLIALLVGTFIIANTFSMIVAQRMREFALLRALGAAPGQITRSVVLEATIVGLFGSALGVLGGMGLVAIISAVLNNLGMPMGSSVGLTPSAVVTALVLGTVVTIVSAWAPARRAGEVKPVEAMRNMETTTMRSMMGRTITGGIVLALGIIFAIAGAMMTDSSTATRSILVGIGALFVIVGTFLFSPALSMPVVGGLGKVIGAPFGSVGSLAATNSKRNPRRTATTAFALTLGIALVTAIGMLSATMKDAVSDMMAEQYTADYILQGPTNGSITMPKESVNDVRDAEGVADVVLVSMNSASVNGQASYSQLGQSVTFVADGDLSKVISTESIDGSLDLSNPGVVTNQTFADENGWAVGDTLQLESMGQTIGDIELIGTFTGNDAIGNMIISESSLADTPAADTAVPQMMLVVGEEGFDKEQLRTNLEDAVADYIVISVKSATEFAGETVAMIDTMMNILYALLALSVIVAIIGIINTLALNVIERRQEIGMLRAVGVKRGQVRTMITLESVQIAIYGAVIGIAIGLGLGWAFVTVMSGEGLDAAVSIPWGQVGLMLVGSAVVGVIAALWPAVKASRTPPLDAITD

SEQ ID NO: 491 - DNA, 1726 bp, Corynebacterium glutamicum
  CDS (101)..(1726): FRXA02898
cacctgaattggctgagggagaggcaccgactggcaccgaagaggtgcttgcctcgaaggcgggcgctgaggcgaatggcctggagtaggggaccagatcttggtcgtggactccagtggccgctacaacgtcaccatcacaggcctgaccaccactgagacggattcggccaccgcgctgaacctgcagatgtcggaagctggctacctggagcgttacaccgacggggctaccgtccccagcgtcatgctgtcggctgcagatggcaccacgcctcaagagcttgtcgacgccctcgctgccgaacttggatcgaactttgatgtagaaaccggcgaagcgctagtcgagcaggctacaggaatgatcacgcaggccttgagcttcgtgcagtacttcctcgttgccttcggtctcattgcactgctggttggtaccttcatcatcgcgaataccttctccatgattgtggctcagcgcatgcgtgagttcgctctcctgcgagccctgggtgcggcgccaggacagatcactcgctctgtggtgctggaagcaaccatcgttggcctcttcggctctgctcttggtgtgctgggtggtatgggcctcgtagcgatcatttcagctgtcctcaataacctgggcatgccgatgggatccagcgttggcttgactccttctgcagtggttaccgcgctcgtattgggcaccgttgtcaccattgtgagcgcgtgggctccggctcgtcgtgcaggtgaggttaagcctgttgaagcgatgcgcaacatggaaaccaccactatgcgttccatgatggggcgcacgatcaccggtggcatcgttctagcactcggcatcatctttgcgattgccggtgcgatgatgactgattcttccaccgctactcgttccatcctggtgggcattggtgcactgtttgtcatcgtgggtacgttcctcttctcaccagcgctctccatgcctgtggtgggtggcctgggcaaggttatcggtgcaccgtttggcagcgttggaagccttgctgcgaccaactccaagcgaaaccctcgccgtaccgcaactacagcgttcgcactgacgttgggcattgccttagtgactgcaattggcatgctttctgcaaccatgaaggacgcagtctccgacatgatggcggagcagtacaccgcagattacatcctgcagggaccaaccaacggttccatcaccatgccgaaggaatctgtcaatgatgttcgcgatgctgagggcgttgccgatgtcgtgctcgtttccatgaactctgcctcggtgaacggtcaggcttcatacagccagctgggccagtctgtaacctttgtcgctgacggcgacctgagcaaggtcatcagcacagaaagcattgatggctccctcgacttgagcaacccaggtgttgtgactaaccagacgtttgctgatgaaaacggctgggcagtaggcgatactctgcagcttgaatcaatggggcagaccatcggcgatatcgagttgatcggtaccttcaccggaaacgacgccatcggaaatatgatcatctccgaaagttccttggctgatacaccagcggcagacactgctgttcctcagatgatgctggtggtaggcgaagaaggctttgataaggaacaactgcgcaccaacttggaagacgcagtcgctgattacattgtcatctctgtgaaa

SEQ ID NO: 492 - protein, 542 aa, Corynebacterium glutamicum
LVVDSSGRYNVTITGLTTTETDSATALNLQMSEAGYLERYTDGATVPSVMLSAADGTTPQELVDALAAELGSNFDVETGEALVEQATGMITQALSFVQYFLVAFGLIALLVGTFIIANTFSMIVAQRMREFALLRALGAAPGQITRSVVLEATIVGLFGSALGVLGGMGLVAIISAVLNNLGMPMGSSVGLTPSAVVTALVLGTVVTIVSAWAPARRAGEVKPVEAMRNMETTTMRSMMGRTITGGIVLALGIIFAIAGAMMTDSSTATRSILVGIGALFVIVGTFLFSPALSMPVVGGLGKVIGAPFGSVGSLAATNSKRNPRRTATTAFALTLGIALVTAIGMLSATMKDAVSDMMAEQYTADYILQGPTNGSITMPKESVNDVRDAEGVADVVLVSMNSASVNGQASYSQLGQSVTFVADGDLSKVISTESIDGSLDLSNPGVVTNQTFADENGWAVGDTLQLESMGQTIGDIELIGTFTGNDAIGNMIISESSLADTPAADTAVPQMMLVVGEEGFDKEQLRTNLEDAVADYIVISVK

SEQ ID NO: 493 - DNA, 410 bp, Corynebacterium glutamicum
  CDS (1)..(387): FRXA01071
aacattctgtacgcgctgcttgctctgtctgtcattgttgccatcatcggcatcatcaacaccctggcactgaatgtgatcgagcgtcgccaggagatcggtatgctccgcgcagttggcgtgaagcgcggacaggtccgcaccatgatcaccttagaatctgttcagatcgccatctacggtgctgtgattggtatcgcgattggtcttggtctgggctgggcctttgtgacagtgatgtcaggcgaaggactagacgctgcggttagtatcccgtggggtcaggtcggactgatgcttgttggttccgctgtagtcggtgttatcgccgcgctgtggccggcagtcaaggcatctaggacaccacctttggatgcgattaccgactagttttagcggcagttgaatca

SEQ ID NO: 494 - protein, 129 aa, Corynebacterium glutamicum
NILYALLALSVIVAIIGIINTLALNVIERRQEIGMLRAVGVKRGQVRTMITLESVQIAIYGAVIGIAIGLGLGWAFVTVMSGEGLDAAVSIPWGQVGLMLVGSAVVGVIAALWPAVKASRTPPLDAITD

SEQ ID NO: 495 - DNA, 534 bp, Corynebacterium glutamicum
  CDS (101)..(511): RXN01075
gcggtgcgtgttcattagcaggtcaagcgcgtaattgagggctagactggttagtaccggatattctttttttctttagtttgtgggagtggagataactatggacaatccagtcaacatcctcaatgagcaggaagctttggagcgcctgcagtcggtgtctcttggtcgcgtggtggttcgtcgcagcgatgagatggacattttcccggtgaacttcattgtggataagggcgcaatttacattcgtacagctgagggcaacaagttgttcagcatgaatctcaaccacgatgtgctctttgaagccgatgaggtcaaggacggaaaggcctggtccgtggtggttcgtgcgaccgcagagattgtgcgcaagctggatgagatcgctactgccgacactttggagttgaagccttggattccaaccctgaagtccaactttgcccgtattgttccgaatgaaatcactgggcgggagttcaccctcggcgaggagcctgagcgctactagctttgccacatttcactaaa

SEQ ID NO: 496 - protein, 137 aa, Corynebacterium glutamicum
MDNPVNILNEQEALERLQSVSLGRVVVRRSDEMDIFPVNFIVDKGAIYIRTAEGNKLFSMNLNHDVLFEADEVKDGKAWSVVVRATAEIVRKLDEIATADTLELKPWIPTLKSNFARIVPNEITGREFTLGEEPERY

SEQ ID NO: 497 - DNA, 534 bp, Corynebacterium glutamicum; identical to SEQ ID NO: 495
  CDS (101)..(511): FRXA01075

SEQ ID NO: 498 - protein, 137 aa, Corynebacterium glutamicum; identical to SEQ ID NO: 496

SEQ ID NO: 499 - DNA, 1137 bp, Corynebacterium glutamicum
  CDS (101)..(1114): RXN01128
attcgagtacaaataaatttgagaacaaaaagatggggggaaatatgttaaagtgcgttatattgctttagcgaaagtaacttccatgcatcaacgttcgatgagcttcactttcattcgtacttttttcgtactttttggcatcacgttgttagtgtcatgcgttccagagcctcctgactcctacactaaagaatccactgtgctgcggtatcaggtctctgatttcaatctaaacttcgtggaattagcagttgcgcttgggtatttgaacaacattgagctccaagtagtcggatctgtacaaggcggcgttgagtccattgaatcgctcaaaaaggatgacattgacttcgcggcagtccccttcattggccttgttgcaggagagatagccaccggtgcgcccatcaaagcagtggccgcaagttacggaatttcccacgattcttcttctgcacttctagtccttaaagacagtgagatacacgaagtgcacgatctcattggcaaaacagttggcataaacaccctcggtgctctgggatctgcgatggttgagcgtcatctattcgacgccggtctcaccgaacctgagatcgtgagcgtcactcaacgtgcattacccggtgagtacttagaacaacgcctctaccaggggcaagttgatgcaatttgggtcaccgatagcgctaaacaccaagcgcttgaaactggagattttcggatcttggcagaggattcagaccttgtgcaggaactcaacactggctgcatggtggtgtcgcaaaaactcatcgacgagcaccccgcagtggttggagaattagtggatggagtagctcaggcaatcgagtttgaacgatcccactcccctgaagaagtgcgcgaagtttatttcaactacctcgaagcccatggtcagagtgatagaatatccagctttagatattgggagcattcgggcatcgcaacccgaggtggagtgctcagtgatagggagttcagcatgtggtcccactggattgaccgccaatacgacgtccccgatatcaatccagcaagtatttacaccaaccaattcaacccataccgaaaagtaaacccctcgccataaaaggcaagggggtcggcgtt

SEQ ID NO: 500 - protein, 338 aa, Corynebacterium glutamicum
MSFTFIRTFFVLFGITLLVSCVPEPPDSYTKESTVLRYQVSDFNLNFVELAVALGYLNNIELQVVGSVQGGVESIESLKKDDIDFAAVPFIGLVAGEIATGAPIKAVAASYGISHDSSSALLVLKDSEIHEVHDLIGKTVGINTLGALGSAMVERHLFDAGLTEPEIVSVTQRALPGEYLEQRLYQGQVDAIWVTDSAKHQALETGDFRILAEDSDLVQELNTGCMVVSQKLIDEHPAVVGELVDGVAQAIEFERSHSPEEVREVYFNYLEAHGQSDRISSFRYWEHSGIATRGGVLSDREFSMWSHWIDRQYDVPDINPASIYTNQFNPYRKVNPSP

SEQ ID NO: 501 - DNA, 1137 bp, Corynebacterium glutamicum; identical to SEQ ID NO: 499
  CDS (101)..(1114): FRXA01128

SEQ ID NO: 502 - protein, 338 aa, Corynebacterium glutamicum; identical to SEQ ID NO: 500

SEQ ID NO: 503 - DNA, 871 bp, Corynebacterium glutamicum
  CDS (101)..(871): RXN01134
gatatcttgaacttgacgctggctgaatacattcctgctgccgatgaaatgatcaagggcttcgacgaggcggctgaattcctgcgtcagcgatgcatttttgagtctcgaccaggttccatacaccgcgcagattgttccactggccgtgatcctcaccctgcttgatgcagaagaaatggccaccgcacgttcatgggatcgtttgaatcagtggttctggagcggtgtcttgggtgagctttatggctcgcctgctgtgatcgcacgttccggtcgcgataccgatcaagttgctgcgtggattcgtgaaggtgccggcgaaactgcggttgtgccaaagactattcgcgataccgttttccacgaatcacgtcttctcagtgcaacccaagacaccggagtgtggaagggtatcttcgcactgctcatgggcaggggagcacgcgactggcgcaccggacagcagtttgatcgctggacttttgatgagctgggttgcaatttccaccagattttccccaccaaatggtgcaaggaacgcggcatcgatcctgtccttacggaatcagtactgaaccgcaccccgatgggtcgccgtaccgaagtagtcatcggcgatacccctccatcccgctacctgtctcgtgttcaatccaagtcgctcatgggtgatgaggaattcgatcagatgctggatacccacctgctcagcgcggaagacctgcacagttccaacaccacgcacttctttgcttctcgacgcaccaacttcatcgacatggtcgaggatgccatcggtaaagcggtgatcagggacgtcaacgagtcagatctcaccggtggacacgatggtccctcggtacacggg

SEQ ID NO: 504 - protein, 257 aa, Corynebacterium glutamicum
LSLDQVPYTAQIVPLAVILTLLDAEEMATARSWDRLNQWFWSGVLGELYGSPAVIARSGRDTDQVAAWIREGAGETAVVPKTIRDTVFHESRLLSATQDTGVWKGIFALLMGRGARDWRTGQQFDRWTFDELGCNFHQIFPTKWCKERGIDPVLTESVLNRTPMGRRTEVVIGDTPPSRYLSRVQSKSLMGDEEFDQMLDTHLLSAEDLHSSNTTHFFASRRTNFIDMVEDAIGKAVIRDVNESDLTGGHDGPSVHG

SEQ ID NO: 505 - DNA, 459 bp, Corynebacterium glutamicum
  CDS (1)..(459): FRXA01134
agtgcaacccaagacaccggagtgtggaagggtatcttcgcactgctcatgggcaggggagcacgcgactggcgcaccggacagcagtttgatcgctggacttttgatgagctgggttgcaatttccaccagattttccccaccaaatggtgcaaggaacgcggcatcgatcctgtccttacggaatcagtactgaaccgcaccccgatgggtcgccgtaccgaagtagtcatcggcgatacccctccatcccgctacctgtctcgtgttcaatccaagtcgctcatgggtgatgaggaattcgatcagatgctggatacccacctgctcagcgcggaagacctgcacagttccaacaccacgcacttctttgcttctcgacgcaccaacttcatcgacatggtcgaggatgccatcggtaaagcggtgatcagggacgtcaacgagtcagatctcacc

SEQ ID NO: 506 - protein, 153 aa, Corynebacterium glutamicum
SATQDTGVWKGIFALLMGRGARDWRTGQQFDRWTFDELGCNFHQIFPTKWCKERGIDPVLTESVLNRTPMGRRTEVVIGDTPPSRYLSRVQSKSLMGDEEFDQMLDTHLLSAEDLHSSNTTHFFASRRTNFIDMVEDAIGKAVIRDVNESDLT

SEQ ID NO: 507 - DNA, 1056 bp, Corynebacterium glutamicum
  CDS (101)..(1033): RXN01140
tatccaacttcccgattttcaacgggattacgcttgggatgttgatcgcatccgaagccttataaccactgttcttcgtggttttccagtaggtgtgctgatggcactagacacccgcggcgaggaaatgcgtttccggccacgcgcgctgtccggcgccccagatacgggcaaggatccaggtcttttgcttctcgacggacaacagcgcctcaccaccctttatcattgcttcagtggcgatggctatgtaaatacggtggacttccgatcaaagaaagtgacccggaagttttatattgatgttgctaaggctgttgaatctccggtcatgtccgatgaggctattttttcagtcgacgaaaccggcaaaatcatctcccacttcggtccagtgatcgacggcggcatcaccgatttagaaacagcacttgctcatggttgccttccagtttctgtgctgctggatgataacggcactgatttcctctttgacctcgccgatatggcaggagaaggcgctcgcgaacacgcgaagcgcttccaatcacaaatcgttaagaccttagttagttacgacatcccaatgatccgactggatcgtgaaaccgccaagggtggaattggttccatctttgctcaggccaatagctctggcttgcagatggatgtctttgatttgctcaccgcggtgttcgcagccgatgaatcggtggagaccgaattctcactgcgtgatgactgggtgcgggttgaacgaaaccttcgccaacactccgcacttgatggcatcggcagcacggagttcctcaccgcagtagccctgttggtcagtgcccgcaagggacatgcgtctggttaccgtgaagatatcttgaacttgacgctggctgaatacattcctgctgccgatgaaatgatcaagggcttcgacgaggcggctgaattcctgcgtcagcgatgcatttttgagtctcgaccaggttccatacaccgcgcagattgttccactggccgtgatcctcaccctgcttgatgcagaagaaatggccaccg

SEQ ID NO: 508 - protein, 311 aa, Corynebacterium glutamicum
MALDTRGEEMRFRPRALSGAPDTGKDPGLLLLDGQQRLTTLYHCFSGDGYVNTVDFRSKKVTRKFYIDVAKAVESPVMSDEAIFSVDETGKIISHFGPVIDGGITDLETALAHGCLPVSVLLDDNGTDFLFDLADMAGEGAREHAKRFQSQIVKTLVSYDIPMIRLDRETAKGGIGSIFAQANSSGLQMDVFDLLTAVFAADESVETEFSLRDDWVRVERNLRQHSALDGIGSTEFLTAVALLVSARKGHASGYREDILNLTLAEYIPAADEMIKGFDEAAEFLRQRCIFESRPGSIHRADCSTGRDPHPA

SEQ ID NO: 509 - DNA, 886 bp, Corynebacterium glutamicum
  CDS (101)..(886): FRXA01140
tatccaacttcccgattttcaacgggattacgcttgggatgttgatcgcatccgaagccttataaccactgttcttcgtggttttccagtaggtgtgctgatggcactagacacccgcggcgaggaaatgcgtttccggccacgcgcgctgtccggcgccccagatacgggcaaggatccaggtcttttgcttctcgacggacaacagcgcctcaccaccctttatcattgcttcagtggcgatggctatgtaaatacggtggacttccgatcaaagaaagtgacccggaagttttatattgatgttgctaaggctgttgaatctccggtcatgtccgatgaggctattttttcagtcgacgaaaccggcaaaatcatctcccacttcggtccagtgatcgacggcggcatcaccgatttagaaacagcacttgctcatggttgccttccagtttctgtgctgctggatgataacggcactgatttcctctttgacctcgccgatatggcaggagaaggcgctcgcgaacacgcgaagcgcttccaatcacaaatcgttaagaccttagttagttacgacatcccaatgatccgactggatcgtgaaaccgccaagggtggaattggttccatctttgctcaggccaatagctctggcttgcagatggatgtctttgatttgctcaccgcggtgttcgcagccgatgaatcggtggagaccgaattctcactgcgtgatgactgggtgcgggttgaacgaaaccttcgccaacactccgcacttgatggcatcggcagcacggagttcctcaccgcagtagccctgttggtcagtgcccgcaagggacatgcgtctggttaccgtgaagatatcttgaacttgacg

SEQ ID NO: 510 - protein, 262 aa, Corynebacterium glutamicum
MALDTRGEEMRFRPRALSGAPDTGKDPGLLLLDGQQRLTTLYHCFSGDGYVNTVDFRSKKVTRKFYIDVAKAVESPVMSDEAIFSVDETGKIISHFGPVIDGGITDLETALAHGCLPVSVLLDDNGTDFLFDLADMAGEGAREHAKRFQSQIVKTLVSYDIPMIRLDRETAKGGIGSIFAQANSSGLQMDVFDLLTAVFAADESVETEFSLRDDWVRVERNLRQHSALDGIGSTEFLTAVALLVSARKGHASGYREDILNLT

SEQ ID NO: 511 - DNA, 723 bp, Corynebacterium glutamicum
  CDS (101)..(700): RXN01148
atagaacaagggtagccaaattcttggaaacagcgcgggcccccgaatccacaatgcgaatccacaatgtcacctgaagccgttaaagtaggtgatcattatgaccagcccagttgaaaacgttaagaaaaagccacgcccattggcgctgtcaccgtcgcgcgccggggattaccagcagtgtcccctgttgtatcgcttccgcgcgattgatcgcctgccagagcctaagaccgtcgcccaggtcaaaggcacgttggtgcacgctgtgttggaatatatgcacaagttgccgcgtgaagaacgcgaatatccagccatggtgaagcaactcaagcccacctgggcgcagatgtgtgaagaagacgcagagctcaaagagcttgttccagaagatgagctttatgatttcctcgtggattcccgcaccctgctgcgtggctactttgaaatggaaaatcctcaaggtttcgacgccaccgaatgcgaaatgtacgtggacactgtgctgcccaacggcgttcctgttcgtggttttatcgaccgtgtggataccgccccaccggccaagtccgagttatcgactacaagactggcaagaaaccaaagccgcagtggagccagcaagcgcagttccagatgctgttctatgcactggtctactggcgcatgttcaatgaaatcccagctcagcttcgtttaatgtacctcaaagtcaacgat

SEQ ID NO: 512 - protein, 200 aa, Corynebacterium glutamicum
MTSPVENVKKKPRPLALSPSRAGDYQQCPLLYRFRAIDRLPEPKTVAQVKGTLVHAVLEYMHKLPREEREYPAMVKQLKPTWAQMCEEDAELKELVPEDELYDFLVDSRTLLRGYFEMENPQGFDATECEMYVDTVLPNGVPVRGFIDRVDTAPPAKSELSTTRLARNQSRSGASKRSSRCCSMHWSTGACSMKSQLSFV

SEQ ID NO: 513 - DNA, 723 bp, Corynebacterium glutamicum; identical to SEQ ID NO: 511
  CDS (101)..(700): FRXA01148

SEQ ID NO: 514 - protein, 200 aa, Corynebacterium glutamicum; identical to SEQ ID NO: 512

SEQ ID NO: 515 - DNA, 543 bp, Corynebacterium glutamicum
  CDS (1)..(543): RXN01153
ccgtttttaagcccgatcgttacttccacgcacgcggtggtggcgtattccaccgcgcgtggatttggtgagcaccgggtgcgttgggactatgcgcaagagtccccactgcgcgatactcgtggctttgatctgcgccgataccaccaggcccctgtggtggatccgcacgccattggtgtggccaacgtgtttgtgcccaatggtgccaggttttatgtcgatcacgcgcacccggaatactcctccccagaggtcaccaatgcgtgggatgccatggtttacgacgccgctggtgaccacatccttatgcaggccgtctctgatgttgcgagtttcaccagccagaataggtctgtgttggacggccatgatccgtgtccagctttgaaaatctacaaaaacaatgtcgacggtaagggtgctagctacgggttccacgagaattacctctactcacgtgagacggattttgatgtgctggctcaggcattgatcccattttttgtgtgccggcaggtcatcatcggtgccggacgtgtg

SEQ ID NO: 516 - protein, 181 aa, Corynebacterium glutamicum
PFLSPIVTSTHAVVAYSTARGFGEHRVRWDYAQESPLRDTRGFDLRRYHQAPVVDPHAIGVANVFVPNGARFYVDHAHPEYSSPEVTNAWDAMVYDAAGDHILMQAVSDVASFTSQNRSVLDGHDPCPALKIYKNNVDGKGASYGFHENYLYSRETDFDVLAQALIPFFVCRQVIIGAGRV

SEQ ID NO: 517 - DNA, 543 bp, Corynebacterium glutamicum; identical to SEQ ID NO: 515
  CDS (1)..(543): FRXA01153

SEQ ID NO: 518 - protein, 181 aa, Corynebacterium glutamicum; identical to SEQ ID NO: 516

SEQ ID NO: 519 - DNA, 677 bp, Corynebacterium glutamicum
  CDS (39)..(677): RXN01154
ccggggaattccaggtcagtcagcgagcctgactaccattgagcaagaaaatttcactggaaaccacactcaaccgcggcattatcaacacccgcgatgaaccacacaccgacgctgatcactggggtcgcctgcacgtgatcatcggcgatgccaacatgtcgcagactgcgaatttcctcaaattcggcatgacctccctagtgctggatgccattgaggctggggtggatttctctgaactcaagctgaagaacgcagtgagtgaagtagcaaaggtctcccatgatctttcccttacccaccagctgcgattggcggatggttcagagctcaccgctattgatattctgcgccgctatttggacaaggtgcagccgtttgcagaaaccccagtggaacagcgtgtcactgcgctgtggggtgaagtgctggggctcctggagaatgatctgctctccaccagccatctccttgattggactgcaaaacttgccctgatcaagtcttttgaggcgcgtgggctgtccattaacgatcccaagatgtacctcattgacctgcagtacagcgatattgatccacagaagagtctgtatcacgcactggtatccaaggggcggatgaaaacactgtgcagtgcgcaggacattgcagatgcagcggccacttcaccg

SEQ ID NO: 520 - protein, 213 aa, Corynebacterium glutamicum
LSKKISLETTLNRGIINTRDEPHTDADHWGRLHVIIGDANMSQTANFLKFGMTSLVLDAIEAGVDFSELKLKNAVSEVAKVSHDLSLTHQLRLADGSELTAIDILRRYLDKVQPFAETPVEQRVTALWGEVLGLLENDLLSTSHLLDWTAKLALIKSFEARGLSINDPKMYLIDLQYSDIDPQKSLYHALVSKGRMKTLCSAQDIADAAATSP

SEQ ID NO: 521 - DNA, 603 bp, Corynebacterium glutamicum
  CDS (1)..(603): FRXA01154
gagggcattatcaacacccgcgatgaaccacacaccgacgctgatcactggggtcgcctgcacgtgatcatcggcgatgccaacatgtcgcagactgcgaatttcctcaaattcggcatgacctccctagtgctggatgccattgaggctggggtggatttctctgaactcaagctgaagaacgcagtgagtgaagtagcaaaggtctcccatgatctttcccttacccaccagctgcgattggcggatggttcagagctcaccgctattgatattctgcgccgctatttggacaaggtgcagccgtttgcagaaaccccagtggaacagcgtgtcactgcgctgtggggtgaagtgctggggctcctggagaatgatctgctctccaccagccatctccttgattggactgcaaaacttgccctgatcaagtcttttgaggcgcgtgggctgtccattaacgatcccaagatgtacctcattgacctgcagtacagcgatattgatccacagaagagtctgtatcacgcactggtatccaaggggcggatgaaaacactgtgcagtgcgcaggacattgcagatgcagcggccacttcaccg

SEQ ID NO: 522 - protein, 201 aa, Corynebacterium glutamicum
EGIINTRDEPHTDADHWGRLHVIIGDANMSQTANFLKFGMTSLVLDAIEAGVDFSELKLKNAVSEVAKVSHDLSLTHQLRLADGSELTAIDILRRYLDKVQPFAETPVEQRVTALWGEVLGLLENDLLSTSHLLDWTAKLALIKSFEARGLSINDPKMYLIDLQYSDIDPQKSLYHALVSKGRMKTLCSAQDIADAAATSP

SEQ ID NO: 523 - DNA, 1570 bp, Corynebacterium glutamicum
  CDS (101)..(1570): RXN01155
acagcttgctggatgaaatcgacggactgttggaaaacaacgccgaggaattcgttcgttcctatgtacaaaagggtggcgaatagtcactgtgagtaccgtggaatccgcattgacccgcaggatcatgggcattgaaacggagtatggcctcacctttgttgatggtgattccaaaaagcttcgcccagatgagatagctcgaaggatgtttcgtcccatcgtggagaaatattccagctctaatatcttcatacccaatggttcccggttgtatcttgatgtgggttcccacccggagtacgccaccgccgagtgtgataatttgacccagctgatcaattttgaaaaagctggcgatgttattgcagatcgcatggctgtagatgccgaagagtcgctggcgaaagaagacattgctgggcaggtgtacctgtttaaaaacaatgtcgattccgtgggcaattcttatggctgccacgaaaactaccttgtgggtcgctccatgccgttgaaggcgttgggtaaaaggctgatgccgtttctgattacccgccagctcatctgcggcgccggcaggatccatcaccccaatcctttggataaaggcgaatccttccccttgggctactgcatatcccagcgctctgaccacgtgtgggagggcgtatcaagtgccaccactagatcacgccccattatcaacacccgtgatgagccacatgcggattcccattcttaccgcaggctgcacgtgattgtgggtgatgccaacatggcagagcccagcatcgcgttgaaggtcggctccacgttgctggttctggaaatgattgaggcagatttcggtttgcccagcttagagcttgccaatgatattgcctcaattagggaaatctcccgcgatgcaacaggatccacactgttgtccctgaaagatggcaccaccatgactgccttgcagatccagcaggtggtctttgagcatgcctcgaagtggttggagcagcgccccgaaccagaattttctggcacctccaacacagagatggcccgcgtgctggatctgtggggtcgcatgttgaaagcgattgagtccggtgatttcagcgaagtggatacagaaattgactgggtgatcaaaaagaagctcattgatcgtttcattcagcgcggcaaccttgggttggatgatccaaaacttgcccaagtggacttgacttatcacgatattaggccaggtagaggcctatttagcgtgctgcaaagccgcggcatgatcaaacggtggactactgatgaggcgattttagctgcggtggataccgctcctgatacaacacgtgctcatttgcgcgggcgaatccttaaagcggcggatactctgggagtacctgtgactgtcgattggatgcgtcacaaggtcaaccgaccggagccacaatcggtggaattgggggatcctttttcccttttaaatcctcaacaaccagcccaagaaactgctttgagcattcttctcctaggcggaacctcttacattgccggtgagattgccacgttgacgttt

SEQ ID NO: 524 - protein, 490 aa, Corynebacterium glutamicum
VESALTRRIMGIETEYGLTFVDGDSKKLRPDEIARRMFRPIVEKYSSSNIFIPNGSRLYLDVGSHPEYATAECDNLTQLINFEKAGDVIADRMAVDAEESLAKEDIAGQVYLFKNNVDSVGNSYGCHENYLVGRSMPLKALGKRLMPFLITRQLICGAGRIHHPNPLDKGESFPLGYCISQRSDHVWEGVSSATTRSRPIINTRDEPHADSHSYRRLHVIVGDANMAEPSIALKVGSTLLVLEMIEADFGLPSLELANDIASIREISRDATGSTLLSLKDGTTMTALQIQQVVFEHASKWLEQRPEPEFSGTSNTEMARVLDLWGRMLKAIESGDFSEVDTEIDWVIKKKLIDRFIQRGNLGLDDPKLAQVDLTYHDIRPGRGLFSVLQSRGMIKRWTTDEAILAAVDTAPDTTRAHLRGRILKAADTLGVPVTVDWMRHKVNRPEPQSVELGDPFSLLNPQQPAQETALSILLLGGTSYIAGEIATLTF

SEQ ID NO: 525 - DNA, 1465 bp, Corynebacterium glutamicum
  CDS (101)..(1465): FRXA01155
acagcttgctggatgaaatcgacggactgttggaaaacaacgccgaggaattcgttcgttcctatgtacaaaagggtggcgaatagtcactgtgagtaccgtggaatccgcattgacccgcaggatcatgggcattgaaacggagtatggcctcacctttgttgatggtgattccaaaaagcttcgcccagatgagatagctcgaaggatgtttcgtcccatcgtggagaaatattccagctctaatatcttcatacccaatggttcccggttgtatcttgatgtgggttcccacccggagtacgccaccgccgagtgtgataatttgacccagctgatcaattttgaaaaagctggcgatgttattgcagatcgcatggctgtagatgccgaagagtcgctggcgaaagaagacattgctgggcaggtgtacctgtttaaaaacaatgtcgattccgtgggcaattcttatggctgccacgaaaactaccttgtgggtcgctccatgccgttgaaggcgttgggtaaaaggctgatgccgtttctgattacccgccagctcatctgcggcgccggcaggatccatcaccccaatcctttggataaaggcgaatccttccccttgggctactgcatatcccagcgctctgaccacgtgtgggagggcgtatcaagtgccaccactagatcacgccccattatcaacacccgtgatgagccacatgcggattcccattcttaccgcaggctgcacgtgattgtgggtgatgccaacatggcagagcccagcatcgcgttgaaggtcggctccacgttgctggttctggaaatgattgaggcagatttcggtttgcccagcttagagcttgccaatgatattgcctcaattagggaaatctcccgcgatgcaacaggatccacactgttgtccctgaaagatggcaccaccatgactgccttgcagatccagcaggtggtctttgagcatgcctcgaagtggttggagcagcgccccgaaccagaattttctggcacctccaacacagagatggcccgcgtgctggatctgtggggtcgcatgttgaaagcgattgagtccggtgatttcagcgaagtggatacagaaattgactgggtgatcaaaaagaagctcattgatcgtttcattcagcgcggcaaccttgggttggatgatccaaaacttgcccaagtggacttgacttatcacgatattaggccaggtagaggcctatttagcgtgctgcaaagccgcggcatgatcaaacggtggactactgatgaggcgattttagctgcggtggataccgctcctgatacaacacgtgctcatttgcgcgggcgaatccttaaagcggcggatactctgggagtacctgtgactgtcgattggatgcgtcacaaggtcaaccgaccggagccacaatcggtggaattgggggatcct

SEQ ID NO: 526 - protein, 455 aa, Corynebacterium glutamicum
VESALTRRIMGIETEYGLTFVDGDSKKLRPDEIARRMFRPIVEKYSSSNIFIPNGSRLYLDVGSHPEYATAECDNLTQLINFEKAGDVIADRMAVDAEESLAKEDIAGQVYLFKNNVDSVGNSYGCHENYLVGRSMPLKALGKRLMPFLITRQLICGAGRIHHPNPLDKGESFPLGYCISQRSDHVWEGVSSATTRSRPIINTRDEPHADSHSYRRLHVIVGDANMAEPSIALKVGSTLLVLEMIEADFGLPSLELANDIASIREISRDATGSTLLSLKDGTTMTALQIQQVVFEHASKWLEQRPEPEFSGTSNTEMARVLDLWGRMLKAIESGDFSEVDTEIDWVIKKKLIDRFIQRGNLGLDDPKLAQVDLTYHDIRPGRGLFSVLQSRGMIKRWTTDEAILAAVDTAPDTTRAHLRGRILKAADTLGVPVTVDWMRHKVNRPEPQSVELGDP

SEQ ID NO: 527 - DNA, 519 bp, Corynebacterium glutamicum
  CDS (101)..(496): RXN01167
gtgtcgttttatttgcacactagcaggtaaactgtgtgagacgaattcttttgcggcaacttggaggccgcattctagtaggcaaaggactgatacctagatggcagatcgcgttcttcgtggcagccgcatgggcgccgtgagctatgagacggatagggaccacgatctggctcctcgccagctcgtgaagtacaagaccgcagacggggaaatctatgaggttcccttcgctgatgatgcggaaatccccgaggagtggatgtgcaagaacggtaagctaggcatcctcatggaaggtgagggagtcgagtccaagccggtcaagcctccacgtactcactgggatatgttgcgtgagcgtcgctcaattgaagagctggatgtgctgctggaagagcgcatcgaggcacttcgtaagcgtcgtcgcaatgcagcgaaactgctgaaggctcagcaagaggctgaagaagcagaaaaggcagctgaagaggtttaatcttcctgcctaagttagaa

SEQ ID NO: 528 - protein, 132 aa, Corynebacterium glutamicum
MADRVLRGSRMGAVSYETDRDHDLAPRQLVKYKTADGEIYEVPFADDAEIPEEWMCKNGKLGILMEGEGVESKPVKPPRTHWDMLRERRSIEELDVLLEERIEALRKRRRNAAKLLKAQQEAEEAEKAAEEV

SEQ ID NO: 529 - DNA, 344 bp, Corynebacterium glutamicum
  CDS (1)..(321): FRXA01167
cctcgccagctcgtgaagtacaagaccgcagacggggaaatctatgaggttcccttcgctgatgatgcggaaatccccgaggagtggatgtgcaagaacggtaagctaggcatcctcatggaaggtgagggagtcgagtccaagccggtcaagcctccacgtactcactgggatatgttgcgtgagcgtcgctcaattgaagagctggatgtgctgctggaagagcgcatcgaggcacttcgtaagcgtcgtcgcaatgcagcgaaactgctgaaggctcagcaagaggctgaagaagcagaaaaggcagctgaagaggtttaatcttcctgcctaagttagaa

SEQ ID NO: 530 - protein, 107 aa, Corynebacterium glutamicum
PRQLVKYKTADGEIYEVPFADDAEIPEEWMCKNGKLGILMEGEGVESKPVKPPRTHWDMLRERRSIEELDVLLEERIEALRKRRRNAAKLLKAQQEAEEAEKAAEEV

SEQ ID NO: 531 - DNA, 1119 bp, Corynebacterium glutamicum
  CDS (101)..(1096): RXN01169
tcttgatcggaatcggcgcaaacatcgtctacgaacacctcagcgcgtaaccctcggcgcattatcctcagacagcttttagcgcaaacaaggagcatcattgaaacgggtcgttgaagcgtgggatagatttcaaatcccactgtatatcacggctcttatcgccggagcactggtgggtttgcagtggccaggctctacagggggtttcgaaagcgccattaacccagcgttaatggcgctgctttatgccacttttctcggtattccgatcactcggattggtgcagcgctgaaagatctgagatttctcatagtgctcatgtccgtcaattttgttgcagtgcctctggtggcttttgcgttgagcagattcattgcgggtgatgaggcgcttctaatcggatttttactggtgattctcgcgccgtgcattgattacgtcattgtctttgctggtttggccagggccgcccaagacaagctccttgccgccacgccaatattaatgcttgtccaaatcctgctgatccccgtcttcctggctgtttttgtgggttcagatgcccttggctcaatctctttcggcccatttgtagaagcatttttcctcctgattctcattccacttgttgctgctgcgggaactcagcaagtggcaagaaagtggcaggtaggacgtacaattatggctgctgcagaagcaatcatggtgcctttaatgatgctgacgttgttcgctgtcatcgcatcgcaagtggaagctgtgagtggtcaattcaccgatatcgccacagtagtgccactatatgtcgcctttttgatggtgatgattccaattggtggcgggatatccaaactcggtggcttaggtttcaaagagcaacgagccatcgtttttagcggagcaacccgtaactctttggtcgttttacctttagcgttagcacttcccgcaggcctggaaatagcggccgtcgtagttgtcactcaaaccctcgtggaactgattggcatggttgtctacgtgcgcatcatccctttaattttccatgaaaagcagacatacaggaaactttcaggcataggggagtcatgaaacagaacggcaagctaagg

SEQ ID NO: 532 - protein, 332 aa, Corynebacterium glutamicum
LKRVVEAWDRFQIPLYITALIAGALVGLQWPGSTGGFESAINPALMALLYATFLGIPITRIGAALKDLRFLIVLMSVNFVAVPLVAFALSRFIAGDEALLIGFLLVILAPCIDYVIVFAGLARAAQDKLLAATPILMLVQILLIPVFLAVFVGSDALGSISFGPFVEAFFLLILIPLVAAAGTQQVARKWQVGRTIMAAAEAIMVPLMMLTLFAVIASQVEAVSGQFTDIATVVPLYVAFLMVMIPIGGGISKLGGLGFKEQRAIVFSGATRNSLVVLPLALALPAGLEIAAVVVVTQTLVELIGMVVYVRIIPLIFHEKQTYRKLSGIGES

SEQ ID NO: 533 - DNA, 590 bp, Corynebacterium glutamicum
  CDS (1)..(567): FRXA01169
atccccgtcttcctggctgtttttgtgggttcagatgcccttggctcaatctctttcggcccatttgtagaagcatttttcctcctgattctcattccacttgttgctgctgcgggaactcagcaagtggcaagaaagtggcaggtaggacgtacaattatggctgctgcagaagcaatcatggtgcctttaatgatgctgacgttgttcgctgtcatcgcatcgcaagtggaagctgtgagtggtcaattcaccgatatcgccacagtagtgccactatatgtcgcctttttgatggtgatgattccaattggtggcgggatatccaaactcggtggcttaggtttcaaagagcaacgagccatcgtttttagcggagcaacccgtaactctttggtcgttttacctttagcgttagcacttcccgcaggcctggaaatagcggccgtcgtagttgtcactcaaaccctcgtggaactgattggcatggttgtctacgtgcgcatcatccctttaattttccatgaaaagcagacatacaggaaactttcaggcataggggagtcatgaaacagaacggcaagctaagg

SEQ ID NO: 534 - protein, 189 aa, Corynebacterium glutamicum
IPVFLAVFVGSDALGSISFGPFVEAFFLLILIPLVAAAGTQQVARKWQVGRTIMAAAEAIMVPLMMLTLFAVIASQVEAVSGQFTDIATVVPLYVAFLMVMIPIGGGISKLGGLGFKEQRAIVFSGATRNSLVVLPLALALPAGLEIAAVVVVTQTLVELIGMVVYVRIIPLIFHEKQTYRKLSGIGES

SEQ ID NO: 535 - DNA, 738 bp, Corynebacterium glutamicum
  CDS (101)..(715): RXN01173
agatctgtttctatgtattaaagatcacaccgagtggtggaatttcctcaagtgatttacccacaatggactttgttgatacccaattcgagaaaggccaatgcacgtgagcactcttccaaacaagaaactgcgtactcgcattttcgcaggcaccgctgccgtcgcactgtcacttggtgttgcgtcttgctcaaacgcagaagatgctgtggatagcgcaacagatgctgccaactctgcaacctccgccgcgggatctgcaattaacgatgccaccggcacttccagcgcatccaccacagagccttccggaacctctggatccgactccgggtctgactctgctggaggagacaccactgaagtagaaagcgccgatgggtccaccatcagcatcccaactgccgtcgtcaccgctgcaaatgctgcaggattcagtaccccggaatccgtggaagaaggcccgaatggtgagtcattggtgacgttccctgaaggctacattgttaactctgcagaaggtggtgcacaagcactggtcggcatgatcggtgaaacctggatcggcgaaggcggactatccgcggcagtgggtctcccaactgggcctgaagaagcaacaacaaatggttggactcaacagttcacatctggagtaattagctggcttgatgatggatcaggacagttcgcagcttctgttgaacctgcttaagggaatctcacctggcctcc

SEQ ID NO: 536 - protein, 205 aa, Corynebacterium glutamicum
MHVSTLPNKKLRTRIFAGTAAVALSLGVASCSNAEDAVDSATDAANSATSAAGSAINDATGTSSASTTEPSGTSGSDSGSDSAGGDTTEVESADGSTISIPTAVVTAANAAGFSTPESVEEGPNGESLVTFPEGYIVNSAEGGAQALVGMIGETWIGEGGLSAAVGLPTGPEEATTNGWTQQFTSGVISWLDDGSGQFAASVEPA

SEQ ID NO: 537 - DNA, 738 bp, Corynebacterium glutamicum; identical to SEQ ID NO: 535
  CDS (101)..(715): FRXA01173

SEQ ID NO: 538 - protein, 205 aa, Corynebacterium glutamicum; identical to SEQ ID NO: 536

SEQ ID NO: 539 - DNA, 873 bp, Corynebacterium glutamicum
  CDS (101)..(850): RXN01174
atatcgcaaccgctgttaatgaagaggaagaggctcgcgatatcgcgaagctgtgccaggagatggtggaattagctcggaatattgagaagttgaggtaatgagcaacatgcagggaaacgattccaagaaatctagcggcgcgagtcgtgcggagagcccactgatcaagttccggacattgattatcgtcatctttgtcatcttgatcgttggtttggcatctattgcagtgggacctgtcgtgtaccagctcatcatgggacctggtgtgaaaaccgaaggaatccaggctgatggcgcagcacctgcgtccaccgacatgaacggcacctgggatgttgccccagggagtattccaaacaccacctcagctggattcaccttcgctgagatcctgccaggcgaagaaaagatcacctccggctcaaccactggtgtcactggcgaagtggtcatcgaggataactccctgatctctggtctgattaccgtcaacatgactcacatcaccaccgatcaggaaaagcgcgacatcaacgtgcgcactaagctcttccacaccgatcagtacccagaagcaacctttgaggttaccgattccgttgatctttctgcgctcccagacaccggatccattgctcaggttgtcatcccaggcgagttgaccatccacggtgaaaccaaggctgtggagcctacctttgatgtacttcgtactggtgaccaagttatcgtggcttccgatatcgaaatcaaccgcctcgacttcggtgtagaaaccccagagttcatcgccgcaaagatcaatgagaccggcgagatcaacgtccgaatcgtattggagaaataaaccatgatggcatcacggat

SEQ ID NO: 540 - protein, 250 aa, Corynebacterium glutamicum
MSNMQGNDSKKSSGASRAESPLIKFRTLIIVIFVILIVGLASIAVGPVVYQLIMGPGVKTEGIQADGAAPASTDMNGTWDVAPGSIPNTTSAGFTFAEILPGEEKITSGSTTGVTGEVVIEDNSLISGLITVNMTHITTDQEKRDINVRTKLFHTDQYPEATFEVTDSVDLSALPDTGSIAQVVIPGELTIHGETKAVEPTFDVLRTGDQVIVASDIEINRLDFGVETPEFIAAKINETGEINVRIVLEK

SEQ ID NO: 541 - DNA, 873 bp, Corynebacterium glutamicum; identical to SEQ ID NO: 539
  CDS (101)..(850): FRXA01174

SEQ ID NO: 542 - protein, 250 aa, Corynebacterium glutamicum; identical to SEQ ID NO: 540

SEQ ID NO: 543 - DNA, 1401 bp, Corynebacterium glutamicum
  CDS (101)..(1378): RXN01229
tagccccgaaagacggcgagggttggctctgcttcgttgtgggaaaactaggcccttaataagctgtgcttatagggtctcctgcaccgataaaggactgatgatcatctccactaacaccgctcaccccctgcacgaaccgcacgtacccagccaccacaatcgtatgaatactctgcgtgccggtgtgctgggtgctaatgacggtatcgtctccattgctgcgctactgctcggtgtgatcgccaccggcgccagtgacaccgtcgtgttcggcgctggtttggcctcaacgatcgcgggggcggtatctatggctctcggtgagtacgtctctgtctcctcacagcgtgataccgaacgggtgctcatcgcaaaagaagcgaaggagctggccgaagacccgacggccgagcacgtcgagctgtcggagatcctacactcctacggcatctmcmmtgwgamtsmrrassmsgcsrmmaycgrgawmgggmasggcgacgccttgggcgcccaccttcagctcgagctcggtattgataatgagcaactgaccagccccttggccgccgccttctcctcggccgtggctttcctgctcggagcactgctgccgatggtgtyggtattcmtygccccykcaggctgggacgccggcgtkgkcttcgtagtcacgstgctggtcctggcggkkaccgggttcatctcarcccmgrtcycgggtacctycccmatgcgcgsgtgcsggsgcttkgkgrtcggkggtkccctcsgscyggccctgaccmtaccgtcttggaawcwattskksgssgcmgywktmkgwgsykcsksrrramararrrggrrkrmkgskkktktkgtggykgsksgkykttktcgwcgmcksswsramgwrrtsrkcgscgmcswcctysywgmmsaycmkssgsskscwkgrwssrcygcyscmssmggskskcsmswkwtrkksyssskswswmtwckyktttyycyycsgsmrgkwamcmmmmykgkksywwkrrrwtktttyykrrrarrmsrmywmcsrrkwrggccaccactgtcaggcgagattctgcttgctggcctcggcggtgagataggcatgggggaaccgaggatcccagtgactactggtgacctggaaacccgcggtctccagtgcctgggcaagctcgggcagtggccaccggtaggcggtggccacgggatgatacatcggttccagagaaggcccggagaaaaaggacatcagcaggccaccaccatcctccaccgccatccgcagtgcgaccagggcgtcgggcagctcgcccgggcccatgtggatcagggagtaccaggccaacaggcctgcccagcgcttcggcgagtctgagaggtcggtaatagtgccgt

SEQ ID NO: 544 - protein, 426 aa, Corynebacterium glutamicum
  MOD_RES (119): Tyr or Ser
  MOD_RES (120): Asn, Thr, His, or Pro
  MOD_RES (121): Glu or Val
  MOD_RES (122): Asn or Thr
  MOD_RES (123): Glu, Asp, Gln, or Pro
  MOD_RES (124): Glu, Ala, Lys, or Asn
  MOD_RES (125): Glu, Ala, His, Pro, or Gln
  MOD_RES (127): Glu, Ala, Asp, Lys, Thr, or Asn
  MOD_RES (128): Ile or Thr
  MOD_RES (129): Gly or Glu
  MOD_RES (130): Lys, Ile, or Asn
  MOD_RES (132): Lys, Gln, Asn, or His
  MOD_RES (175): Leu or Ser
  MOD_RES (178): Ile or Leu
  MOD_RES (181): Ala or Ser
  MOD_RES (188): Gly or Val
  MOD_RES (193): Val or Leu
  MOD_RES (198): Gly or Val
  MOD_RES (204): Ala or Thr
  MOD_RES (205): Gln or Pro
  MOD_RES (206): Val or Ile
  MOD_RES (207): Ser or Pro
  MOD_RES (210): Phe or Ser
  MOD_RES (214): Gly or Ala
  MOD_RES (216)..(217): Gly or Arg
  MOD_RES (218): Leu or Phe
  MOD_RES (219): Gly or Val
  MOD_RES (220): Val or Ile
  MOD_RES (223): Ala or Ser
  MOD_RES (225): Gly or Arg
  MOD_RES (226): Leu or Pro
  MOD_RES (230): Ile or Leu
  MOD_RES (234): Lys or Thr
  MOD_RES (235): Gln or Leu
  MOD_RES (236): Leu or Phe
  MOD_RES (237): Gly, Val, Trp, Leu, Cys, or Phe
  MOD_RES (238): Gly or Ala
  MOD_RES (240): Val or Ala
  MOD_RES (241): Val, Leu, or Phe
  MOD_RES (242): Gly, Cys, or not present
  MOD_RES (243): Gly or Ala
  MOD_RES (244): Ala or Ser
  MOD_RES (245): Gly, Ala, Trp, Ser, or not present
  MOD_RES (246): Gly, Glu, Arg, or Lys
  MOD_RES (247): Lys or Gln
  MOD_RES (248): Arg or Lys
  MOD_RES (249): Gly or Arg
  MOD_RES (250): Gly, Glu, Arg, Lys, Asp, Asn, or Ser
  MOD_RES (251): Glu, Ala, Asp, Lys, Thr, or Asn
  MOD_RES (252): Gly or Ala
  MOD_RES (253): Gly, Val, Cys, or Phe
  MOD_RES (254): Val, Leu, or Phe
  MOD_RES (256): Val or Ala
  MOD_RES (257): Gly or Ala
  MOD_RES (258): Gly or Arg
  MOD_RES (259): Cys, Phe, Arg, or Leu
  MOD_RES (260): Cys or Phe
  MOD_RES (263): Arg or Leu
  MOD_RES (264): Glu, Val, Asp, Gln, Leu, or His
  MOD_RES (265): Glu, Ala, Lys, or Asn
  MOD_RES (266): Glu or Val
  MOD_RES (267): Val, Met, or Ile
  MOD_RES (268): Gly, Val, Ser, or Ile
  MOD_RES (269): Gly or Ala
  MOD_RES (270): Asp or Ala
  MOD_RES (271): Asp, Val, His, or Leu
  MOD_RES (273): Val, Ala, Leu, or Pro
  MOD_RES (274): Asp, Ala, or Glu
  MOD_RES (275): Thr or His
  MOD_RES (276): Gln, His, or Pro
  MOD_RES (277)..(278): Gly, Pro, Arg, or Ala
  MOD_RES (279): Ala or Pro
  MOD_RES (280): Gly, Trp, or not present
  MOD_RES (281): Arg, Trp, Thr, Ser, or Cys
  MOD_RES (282): Ala or Thr
  MOD_RES (284): Ala or Pro
  MOD_RES (285): Gly, Pro, Arg, or Ala
  MOD_RES (287): Gly, Ala, Trp, Cys, or Ser
  MOD_RES (288): Arg or Pro
  MOD_RES (289): Glu, Val, Asp, Gln, Leu, or His
  MOD_RES (290): Met, Ile, or Leu
  MOD_RES (291): Gly, Val, Trp, Leu, Cys, or Phe
  MOD_RES (292): Trp, Ser, Cys, Arg, or Pro
  MOD_RES (293): Gly, Val, Arg, or Leu
  MOD_RES (294): Arg, Ser, Thr, Cys, or not present
  MOD_RES (295): Ile or Leu
  MOD_RES (296): Arg or Leu
  MOD_RES (297): Val or Phe
  MOD_RES (298): Phe or Ser
  MOD_RES (299): Leu or Pro
  MOD_RES (300): Arg or Pro
  MOD_RES (301): Glu, Asp, Gln, or Pro
  MOD_RES (302): Gly or Val
  MOD_RES (303): Asn or Thr
  MOD_RES (304): Lys, Asn, Thr, Gln, His, or Pro
  MOD_RES (305): Met, Ile, Thr, Leu, or Pro
  MOD_RES (306): Gly or Val
  MOD_RES (307): Val, Ala, Leu, or Pro
  MOD_RES (308): Arg, Met, Ile, Trp, Leu, or not present
  MOD_RES (309): Gly, Glu, Asp, Cys, Tyr, or not present
  MOD_RES (310): Cys or Phe
  MOD_RES (312): Trp, Leu, Arg, or not present
  MOD_RES (313): Gly, Glu, Arg, or Lys
  MOD_RES (314): Gly, Glu, Cys, Tyr, or not present
  MOD_RES (315): Gly, Glu, Asp, Arg, Gln, or His
  MOD_RES (316): Tyr, Leu, Phe, Gln, His, Leu, or not present
  MOD_RES (317): Arg or Pro
  MOD_RES (318): Gly, Val, Arg, Ser, or Ile
  MOD_RES (319): Gly or Arg
MIISTNTAHPLHEPHVPSHHNRMNTLRAGVLGANDGIVSIAALLLGVIATGASDTVVFGAGLASTIAGAVSMALGEYVSVSSQRDTERVLIAKEAKELAEDPTAEHVELSEILHSYGIXXXXXXXAXXXXGXGDALGAHLQLELGIDNEQLTSPLAAAFSSAVAFLLGALLPMVXVFXAPXGWDAGVXFVVTXLVLAXTGFISXXXXGTXPMRXCXXXXXGGXLXXALTXPSWXXXXXAXXXXXXXXXXXXXXXVXXXXXRRXXXXXXXXXLXXXXXXXXXXAXXGXXXXXXXXXXXXXXXXXXXXXXXXFXXXXXXXXPPLSGEILLAGLGGEIGMGEPRIPVTTGDLETRGLQCLGKLGQWPPVGGGHGMIHRFQRRPGEKGHQQATTILHRHPQCDQGVGQLARAHVDQGVPGQQACPALRRV

SEQ ID NO: 545 - DNA, 793 bp, Corynebacterium glutamicum
  CDS (101)..(793): FRXA01229
tagccccgaaagacggcgagggttggctctgcttcgttgtgggaaaactaggcccttaataagctgtgcttatagggtctcctgcaccgataaaggactgatgatcatctccactaacaccgctcaccccctgcacgaaccgcacgtacccagccaccacaatcgtatgaatactctgcgtgccggtgtgctgggtgctaatgacggtatcgtctccattgctgcgctactgctcggtgtgatcgccaccggcgccagtgacaccgtcgtgttcggcgctggtttggcctcaacgatcgcgggggcggtatctatggctctcggtgagtacgtctctgtctcctcacagcgtgataccgaacgggtgctcatcgcaaaagaagcgaaggagctggccgaagacccgacggccgagcacgtcgagctgtcggagatcctacactcctacggcatctcccctgagactgcgaaccaggcggccaccgagatcgggcagggcgacgccttgggcgcccaccttcagctcgagctcggtattgataatgagcaactgaccagccccttggccgccgccttctcctcggccgtggctttcctgctcggagcactgctgccgatggtgtcggtattcatcgcccctgcaggctgggacgccggcgtggtcttcgtagtcacgctgctggtcctggcggtgaccgggttcatctcagcccagatctcgggtacctccccaatgcgcgcgtgcgggcgcttggtgatcggtggtgccctcggcctggccctaacctacggt

SEQ ID NO: 546 - protein, 231 aa, Corynebacterium glutamicum
MIISTNTAHPLHEPHVPSHHNRMNTLRAGVLGANDGIVSIAALLLGVIATGASDTVVFGAGLASTIAGAVSMALGEYVSVSSQRDTERVLIAKEAKELAEDPTAEHVELSEILHSYGISPETANQAATEIGQGDALGAHLQLELGIDNEQLTSPLAAAFSSAVAFLLGALLPMVSVFIAPAGWDAGVVFVVTLLVLAVTGFISAQISGTSPMRACGRLVIGGALGLALTYG

SEQ ID NO: 547 - DNA, 630 bp, Corynebacterium glutamicum
  CDS (101)..(607): RXN01246
gggaaggaggagaaggctgctgtgagctctgcagcccccgtccgctgactttcaatgcttcatggactccccgatacacaacctccgaaagggaacccccatgaagcgcactatcaccatcgccgctctcgccttgacctccaccctggttttgtccgcctgcgcagataacactgagggagaaaacaccgacaccacgaccatcgccactacgtccgcccccgacaccaccgaaacgaccggggccaccacggatcctgagacagagacgggggcggccggagaggtctccgccgagcacaatgatgcggacatcatgttcgcgcagatgatgatcccgcatcaccaacaggccgtggagatgagtgaaatcctcctggccaaggacgatatcccggccgaggtcatcgagttcacccagggtgttatcgatgcccagggcccggagatcgaccggatgaataccatgctcgagacctgggaagaagatccggtcaccggtgatatgggtgagatggaccatggcgggatgagtggaatgatgagcgaggaggacatgacagccctcgaggacgcccagggcacccgaggctgcccggctctaccttgagcagatgaccgcccaccatg

SEQ ID NO: 548 - protein, 169 aa, Corynebacterium glutamicum
MKRTITIAALALTSTLVLSACADNTEGENTDTTTIATTSAPDTTETTGATTDPETETGAAGEVSAEHNDADIMFAQMMIPHHQQAVEMSEILLAKDDIPAEVIEFTQGVIDAQGPEIDRMNTMLETWEEDPVTGDMGEMDHGGMSGMMSEEDMTALEDAQGTRGCPALP

SEQ ID NO: 549 - DNA, 739 bp, Corynebacterium glutamicum
  CDS (101)..(739): FRXA01246
gggaaggaggagaaggctgctgtgagctctgcagcccccgtccgctgactttcaatgcttcatggactccccgatacacaacctccgaaagggaacccccatgaagcgcactatcaccatcgccgctctcgccttgacctccaccctggttttgtccgcctgcgcagataacactgagggagaaaacaccgacaccacgaccatcgccactacgtccgcccccgacaccaccgaaacgaccggggccaccacggatcctgagacagagacgggggcggccggagaggtctccgccgagcacaatgatgcggacatcatgttcgcgcagatgatgatcccgcatcaccaacaggccgtggagatgagtgaaatcctcctggccaaggacgatatcccggccgaggtcatcgagttcacccagggtgttatcgatgcccagggcccggagatcgaccggatgaataccatgctcgagacctgggaagaagatccggtcaccggtgatatgggtgagatggaccatggcgggatgagtggaatgatgagcgaggaggacatgacagccctcgaggacgcccagggcaccgaggctgcccggctctaccttgagcagatgaccgcccaccatgagggcgcggtcgatatggcccgcgatgaggtcactgatggccagaacccgcaggccatcgctctggctgagcaggtcattgaagatcaggaggccgagatcgccgagatt

SEQ ID NO: 550 - protein, 213 aa, Corynebacterium glutamicum
MKRTITIAALALTSTLVLSACADNTEGENTDTTTIATTSAPDTTETTGATTDPETETGAAGEVSAEHNDADIMFAQMMIPHHQQAVEMSEILLAKDDIPAEVIEFTQGVIDAQGPEIDRMNTMLETWEEDPVTGDMGEMDHGGMSGMMSEEDMTALEDAQGTEAARLYLEQMTAHHEGAVDMARDEVTDGQNPQAIALAEQVIEDQEAEIAEI

SEQ ID NO: 551 - DNA, 471 bp, Corynebacterium glutamicum
  CDS (1)..(471): RXN01249
tctcagattgtggcggtgtcttctcacggtcttaccacgatccaggagattgacgtgaaacgagcagcgatcgcagccgccgcccttaccctcgccctcacggggtgttcggccgccgacccggaacccaccgccgacgggacggtgtcccaggatacattcctgactacccatggcctggccgccatggacgcggtggagatcattgatcacctcgaccggcagaaggtcactgagcgtcccacggatctgatcgcctcagtgcgtgccgatgaactgctgctctcgagcgatgaccaggaagtcgtggtcgatcttcccgacaatcagacgtatgtctcgatcgcaccctacctcaactccacccacgactgcttctaccacagcctcacgacctgcctgggggatctcgacaatgaggatatccatgtcatgatcaccgatgaagcgaccggcgaggtcctgttcgat

SEQ ID NO: 552 - protein, 157 aa, Corynebacterium glutamicum
SQIVAVSSHGLTTIQEIDVKRAAIAAAALTLALTGCSAADPEPTADGTVSQDTFLTTHGLAAMDAVEIIDHLDRQKVTERPTDLIASVRADELLLSSDDQEVVVDLPDNQTYVSIAPYLNSTHDCFYHSLTTCLGDLDNEDIHVMITDEATGEVLFD

SEQ ID NO: 553 - DNA, 400 bp, Corynebacterium glutamicum
  CDS (101)..(400): FRXA01249
gaattgacgtggaaccgagcagcgatcgcagcccgccgcccttaccctcgccctcacggggtgttcggccgccgacccggaacccaccgccgacgggacggtgtcccaggatacattcctgactacccatggcctggccgccatggacgcggtggagatcattgatcacctcgaccggcagaaggtcactgagcgtcccacggatctgatcgcctcagtgcgtgccgatgaactgctgctctcgagcgatgaccaggaagtcgtggtcgatcttcccgacaatcagacgtatgtctcgatcgcaccctacctcaactccacccacgactgcttctaccacagcctcacgacctgcctgggggatctcgacaatgaggatatccatgtcatgatcaccgat

SEQ ID NO: 554 - protein, 100 aa, Corynebacterium glutamicum
VSQDTFLTTHGLAAMDAVEIIDHLDRQKVTERPTDLIASVRADELLLSSDDQEVVVDLPDNQTYVSIAPYLNSTHDCFYHSLTTCLGDLDNEDIHVMITD

SEQ ID NO: 555 - DNA, 432 bp, Corynebacterium glutamicum
  CDS (101)..(409): RXN01251
tgtaagccgagagcgaacctgccaaaagtaaggggcgggttcgcggtgacgtcggtaggatcgagcgaagaaaccaacaaacttcttaggagccattctcatgacccagccagatatgtcccagatcctcgcccaagctcagcagatgcaggctcaactacaggccgctcagcaggaaatcctggcaaccaccgttgtcggaaatgcaggaaacgggctggttaccgtcactatggccggcaacggcgaggtctccgcagtgaccgttgacccaaaggtcgttgaccctgaagatgtcgaaaccctacaggaccttctgctcggtgcattcaaggatgcccataacaaggtcgcaaacgttgctgaagagaagatgggcccactatcccagggcatgggtggcctcttctaattagttgctaaacgcagggc

SEQ ID NO: 556 - protein, 103 aa, Corynebacterium glutamicum
MTQPDMSQILAQAQQMQAQLQAAQQEILATTVVGNAGNGLVTVTMAGNGEVSAVTVDPKVVDPEDVETLQDLLLGAFKDAHNKVANVAEEKMGPLSQGMGGLF

SEQ ID NO: 557 - DNA, 432 bp, Corynebacterium glutamicum
  CDS (101)..(409): FRXA01251
tgtaagccgagagcgaacctgccaaaagtaaggggcgggttcgcggtgacgtcggtaggatcgagcgaagaaaccaacaaacttcttaggagccattctcatgacccagccagatatgtcccagatcctcgcccaagctcagcagatgcaggctcaactacaggccgctcagcaggaaatcctggcaaccaccgttgtcggaaatgcaggaaacgggctggttaccgtcactatggccggcaacggcgaggtcttcgcagtgaccgttgacccaaaggtcgttgaccctgaagatgtcgaaaccctacaggaccttctgctcggtgcattcaaggatgcccataacaaggtcgcaaacgttgctgaagagaagatgggcccactatcccagggcatgggtggcctcttctaattagttgctaaacgcagggc

SEQ ID NO: 558 - protein, 103 aa, Corynebacterium glutamicum
MTQPDMSQILAQAQQMQAQLQAAQQEILATTVVGNAGNGLVTVTMAGNGEVFAVTVDPKVVDPEDVETLQDLLLGAFKDAHNKVANVAEEKMGPLSQGMGGLF

SEQ ID NO: 559 - DNA, 1035 bp, Corynebacterium glutamicum
  CDS (101)..(1012): RXN01263
agtggcctttggagttattttgatgacggtatcggcgactgctgggatcctcctctttttatctccaaatagaagccaagctgcgccaccccaatttagtttgaccccgtatgatccaaccgctgtaaataaggagtcggaaaaagaagcagcaaagaatctgtttggcgctgaggcgttgacagtggatccggatgccggtgaggttgttgatcgagtagataatttttatccgacgactgctaaggcaaaacgagattacccaagtaactatgcagcgggttgtcaccaagaagtcaatgagactagtcctgagtcatgtgtttatggtgataaaaattctgatttttctgtagcacttgtcggtgactcccacgctggtcattggcttcctgccttggaaccaattgctgaagcacaggggtggagattggaagtttatacaaagtcacagtgtccactcataagcactgcgatcaaacttggtgaaactttttatgcagaatgctatgagtggaatgaaaaattacttgctaagctaactggaccttctgcaccaaatcatgtgattgtaagtagccaacgttacgcttctgcaaatccgttaatcgatagtgtcgcgacgggaaccgtttccgaaggatatgaaatggcatggaattcattaaaagatgcaggtgtttctatttctgtacttcttgatactcctcggccgcaaattgatatcccagaatgtgtagcatcaaaccgcgataatctctcagaatgttcagttcaccggagcgttgcgcttgggactgaagctcatcctcagcaaaaaactgcagctcaaaatatagacgtgcctgtattggatttgagtaattggatttgtccggaagaatattgctccgctgttatcggaaatgttttggtatacagggattcacatcatttgaccgctacgtatgctcgtagtctctctagcgcattatggaatgagttggttgcctcaaatggtgagccttttaagtaagaggtagttgttcaagtagc

SEQ ID NO: 560 - protein, 304 aa, Corynebacterium glutamicum
LTPYDPTAVNKESEKEAAKNLFGAEALTVDPDAGEVVDRVDNFYPTTAKAKRDYPSNYAAGCHQEVNETSPESCVYGDKNSDFSVALVGDSHAGHWLPALEPIAEAQGWRLEVYTKSQCPLISTAIKLGETFYAECYEWNEKLLAKLTGPSAPNHVIVSSQRYASANPLIDSVATGTVSEGYEMAWNSLKDAGVSISVLLDTPRPQIDIPECVASNRDNLSECSVHRSVALGTEAHPQQKTAAQNIDVPVLDLSNWICPEEYCSAVIGNVLVYRDSHHLTATYARSLSSALWNELVASNGEPFK

SEQ ID NO: 561 - DNA, 1035 bp, Corynebacterium glutamicum; identical to SEQ ID NO: 559
  CDS (101)..(1012): FRXA01263

SEQ ID NO: 562 - protein, 304 aa, Corynebacterium glutamicum; identical to SEQ ID NO: 560

SEQ ID NO: 563 - DNA, 1158 bp, Corynebacterium glutamicum
  CDS (101)..(1135): RXN01266
gattgtgaagttttatatctgtcatattctggtgattttcgccctgctcatgaagtggcggacgagcaatggcccgatatagatttagtaaggaactaaaatgccaaaagtaagtgtggttactggtttttataaccgctgtgagcatttagaacgaaccattgagtctattcttaaccaaacttatagcgattttgaattaattgtttttgatgatgcatcgacagatggaacagcttcacgattgttagagttaaaagaaaaatatgatgatccgcgtttccgatttatcattcatgaagagaataaaggtttcgtaaaagggttatcagaagcaatttctggagctaaagggcagtatattgcagtccagggatcaggcgatgtatctcttcctcgccgtttagagcttcaggtagagtttctagacgcgaatccttcggtaggtgctgtgggtggtgctatctataatattcaagaagatacgggaacacgcaacccacagagatttgaaaagccaattgctacattcgatgatttattgacatctaatccgttcactcacggagaagtgatgtatcgcttagacctttataagagtataggtgggtatcgaagtggctttacttttgctcaagatcgtgatttatggttgaggatggcgaaaaaagcagatctgggtatcattccagattttctttatcaccgttacacacttttagatggtgtctctttcgtcccggataaaactatacgtcagcgatgcttttcagaagctgcggtgcgactggcattaatgccagaagaggaaggagctttagcctactctaggctggaagctgaagggcctactgccgtagttcctatcgctgatagagctgttcagaaatttgtccctaaagcggctattcgcttatgtctatatggtgctccggaaactggtttacacatggctcgagactatatccagaaccctctgcgccgtaccatagttgtagttttgatcagcatctattcgtctagattaattaagcctcttcaagatattctatataagtctatttttaagggggtctcgatttctaaacctattaagagttcactcgtgaagtttacaagaagaattcaagggaagtagcgaaaaaccgcatctaccaa

SEQ ID NO: 564 - protein, 345 aa, Corynebacterium glutamicum
MPKVSVVTGFYNRCEHLERTIESILNQTYSDFELIVFDDASTDGTASRLLELKEKYDDPRFRFIIHEENKGFVKGLSEAISGAKGQYIAVQGSGDVSLPRRLELQVEFLDANPSVGAVGGAIYNIQEDTGTRNPQRFEKPIATFDDLLTSNPFTHGEVMYRLDLYKSIGGYRSGFTFAQDRDLWLRMAKKADLGIIPDFLYHRYTLLDGVSFVPDKTIRQRCFSEAAVRLALMPEEEGALAYSRLEAEGPTAVVPIADRAVQKFVPKAAIRLCLYGAPETGLHMARDYIQNPLRRTIVVVLISIYSSRLIKPLQDILYKSIFKGVSISKPIKSSLVKFTRRIQGK

SEQ ID NO: 565 - DNA, 1158 bp, Corynebacterium glutamicum; identical to SEQ ID NO: 563
  CDS (101)..(1135): FRXA01266

SEQ ID NO: 566 - protein, 345 aa, Corynebacterium glutamicum; identical to SEQ ID NO: 564

SEQ ID NO: 567 - DNA, 1041 bp, Corynebacterium glutamicum
  CDS (101)..(1018): RXN01275
cgccatactaggctcggccttttcgacgggaactcggataggcttctgtaaaaccatccccgttgaagagagactcgtggctgaaataaccaccccattaatggaaaaaattcgctcacccgcagtccaatcagatgcactgcaggtttttaaatcagcacttgctgcgacagtcacgtggtggatttcggttaacctccttaactcccaactaccctttttagctccctgggtagcgttaatgacgatgcaattcaccgtctaccacacctttatcagtggaattcagactgcaattgcttctgtcatcggagttggactttcctttgtcataggcacttacttagacgtaagtgtgtggacttttggccttgcaatggtcataggattaataggtgcacgagtaccaaagctccgcgcggaaggaataggtattgctactacatccatttttcttcttgcctccgggtttgatgatcaacaaccccttctatacgaccgtattttagagatcctgctcggcgtggctgttgccatagccatcaacctcatcatctttcctcccttacgcgaccaggaggcaaacatggtggtaggaaacttagatcggaggatgggtgaggttttacaaaaaatggccgatgagcttgcagaaaagtggaatatcgacaatgcagatgagtggctggaagaaattaattctattaacaatgacctagaaaaagcgtggcactccgtgcggttcgttcgcgaaagccgtcgagttaatcctcgtaaaatccgcatccaagagggccgcccccagcctacggaaacaagttatgaatcaaacctcaccagcattgatgaagggatcgctcatttacgccaccttgcccgtactcttcgtgataccccgattatagattccgactggggatccagtattccagcaacagtgggtatcccttatgcacgatgccggagctttgctcgcagatccgaatcaggaaatagatcctatccgcgaccggctctctaaactttcaagtgagatgagtg

SEQ ID NO: 568 - protein, 306 aa, Corynebacterium glutamicum
MEKIRSPAVQSDALQVFKSALAATVTWWISVNLLNSQLPFLAPWVALMTMQFTVYHTFISGIQTAIASVIGVGLSFVIGTYLDVSVWTFGLAMVIGLIGARVPKLRAEGIGIATTSIFLLASGFDDQQPLLYDRILEILLGVAVAIAINLIIFPPLRDQEANMVVGNLDRRMGEVLQKMADELAEKWNIDNADEWLEEINSINNDLEKAWHSVRFVRESRRVNPRKIRIQEGRPQPTETSYESNLTSIDEGIAHLRHLARTLRDTPIIDSDWGSSIPATVGIPYARCRSFARRSESGNRSYPRPAL

SEQ ID NO: 569 - DNA, 1041 bp, Corynebacterium glutamicum; identical to SEQ ID NO: 567
  CDS (101)..(1018): FRXA01275

SEQ ID NO: 570 - protein, 306 aa, Corynebacterium glutamicum; identical to SEQ ID NO: 568

SEQ ID NO: 571 - DNA, 885 bp, Corynebacterium glutamicum
  CDS (101)..(862): RXN01281
ggacaacctcatcaaatgcaaacatgcgccaccgcgtcccggaaaaccaggggcgataccgcgcttgagtgcgaggtgccgtcaattcccaactacaagagtgggactcagccgttcacattatcagctagccgcagaaaacaccaaatcccttgttagaatggttcccatgactgttcctcaaggaaacgaaccagcaaagaagctcgccactgaccttaaccgaaaccaagtcgtggatgaactttctgcagctgtttcccgaggtcaactcactttggaggaatttgaagatcgctcctccaaagcatggaatgcccgccacttagacactcttgtagagctgatctctgatgtgaacgacaatccctacactctgcttggtcagcaatttcccggcgcctcctatgcgccggcggcctacgagaccactcccccagcgatgcccaatgtgtcagatcctgtaaatattgtccgcaacaggattaccggcaacccgaatggctccaaaatgtcggtctcgtttatgggtggcaccgtgcgcaaaggtggatggcatgtgcctaatgttcacacatccttcgccatgatgggcggcaatcagatcgatttgcgcgacgccttcctggaaagcgaccgcattcagatcaacgcctacacattcatgggtggcatcgagattattgttcccgagggtgtttttgtcatttgtgatggcatgggcattttcggcggcttcgaacagtctgtggacaaggccggtgcactcaatcccgcgcgcctgccaagcaacgcgcccacggtccacatcaaaggcctggcgttcatgggcggagtcagcgtagtcaccaagaaaaacatttaaaaagcttgtcgacgcgcccc

SEQ ID NO: 572 - protein, 254 aa, Corynebacterium glutamicum
VGLSRSHYQLAAENTKSLVRMVPMTVPQGNEPAKKLATDLNRNQVVDELSAAVSRGQLTLEEFEDRSSKAWNARHLDTLVELISDVNDNPYTLLGQQFPGASYAPAAYETTPPAMPNVSDPVNIVRNRITGNPNGSKMSVSFMGGTVRKGGWHVPNVHTSFAMMGGNQIDLRDAFLESDRIQINAYTFMGGIEIIVPEGVFVICDGMGIFGGFEQSVDKAGALNPARLPSNAPTVHIKGLAFMGGVSVVTKKNI

SEQ ID NO: 573 - DNA, 885 bp, Corynebacterium glutamicum; identical to SEQ ID NO: 571
  CDS (101)..(862): FRXA01281

SEQ ID NO: 574 - protein, 254 aa, Corynebacterium glutamicum; identical to SEQ ID NO: 572

SEQ ID NO: 575 - DNA, 1206 bp, Corynebacterium glutamicum
  CDS (101)..(1183): RXN01296
taaaactcctgttcgaaattgcccagacaggtgtccaccaacactgctacattgcattggagatccagaatcgatcactctacgaccaggaaaaactttcatgtccatcgagcaagcaatcacttcactctccgcaagagtgcgggaactaaagcccatcatcgagactgaagaagccaccaaaaccgcactgatcatcccctttatcagcaacgttctcggctacgacgtcactgatcctcgtgaagtcattccggaatacactgctgatgttggcgtcaaaaagggtgagaaggtcgacttcgctatcaaaaccggcgatgatttccacttcctcatcgaatgcaaaaaggtcggctccccactcagcctcgatcacgctaaccagctcgtccgctatttcaatgtcacagacaccgaatttgccattctcaccaacggcgaaatctaccaattctatggacaactcgatgcagccaaccgcatggatgcaaaaccattcatgaccttggatttgaacaatattgatgcccgtcagttccctcatttggaaatgtgtacccgcaagcatttcaacccacaagcgctagccgccaacgctgaagaactgaagtacattgctgaattgaagaaagtcatcgcgaatcaattccaagaacctgacgtagaaatcgtcaagatgcttgcggcgacagtcaccacaaagcgtatgactgcacaaaatctggaattcttcacccgcttggttaatactgcgtcttcccagttcctcaaagacgaggtcaatcgtagattgcgctccgcccaagtctttgaggatcctgtccaaacacaaggtgctgatgcagaaacaccagcagaggacgaagcagtaatcgaagaagtggtttcagaaatcgtgacgacagaagaggaaatccacggtcattcaattgtccgtgcaatttgctgctcagaggtatcggcacaagaaatcaccatgcgtgacgcaaaatcctactgcgctattctcttccaagacaacaaccgaaagccaatcgcccgtttctactttgatcgcaagattccacgcatcggcatcttcaatgctgaaggcgagcaggaacactttgatttggaatccatcgaagatatctacaaccacgctgatcttctgcattcccgcgtcgtagcattgaacgcttaagttctgcctttagttctgca

SEQ ID NO: 576 - protein, 361 aa, Corynebacterium glutamicum
MSIEQAITSLSARVRELKPIIETEEATKTALIIPFISNVLGYDVTDPREVIPEYTADVGVKKGEKVDFAIKTGDDFHFLIECKKVGSPLSLDHANQLVRYFNVTDTEFAILTNGEIYQFYGQLDAANRMDAKPFMTLDLNNIDARQFPHLEMCTRKHFNPQALAANAEELKYIAELKKVIANQFQEPDVEIVKMLAATVTTKRMTAQNLEFFTRLVNTASSQFLKDEVNRRLRSAQVFEDPVQTQGADAETPAEDEAVIEEVVSEIVTTEEEIHGHSIVRAICCSEVSAQEITMRDAKSYCAILFQDNNRKPIARFYFDRKIPRIGIFNAEGEQEHFDLESIEDIYNHADLLHSRVVALNA

SEQ ID NO: 577 - DNA, 1206 bp, Corynebacterium glutamicum; identical to SEQ ID NO: 575
  CDS (101)..(1183): FRXA01296

SEQ ID NO: 578 - protein, 361 aa, Corynebacterium glutamicum; identical to SEQ ID NO: 576

SEQ ID NO: 579 - DNA, 1131 bp, Corynebacterium glutamicum
  CDS (101)..(1108): RXN01306
tgttttagaggtagagcgaaacgtgcctgtaaaactggcgctcgctgtgctcgaagaccacccagacaatcaccccgctccgaaggagaatcgctaagccatgactgaatggtatgtcgttttacccgccactattctactcatcgcgctgtctgcgtttttcgtcatcattgagttcgctttgcttgcagctaggcggaaccggttagaggagactgtggaaacctcgcggtcttcccgcgctgcgttgcgaagcctcaatgaacttactctcatgctcgcgggcgcgcagttgggaatcaccatggtgactttcgcgttgggtgctatcacgaagccgtgggttcattatgctttgatgccgctcttcgaatgggcgcgtataccgctggttatggcagatgtcattgcgtttattttgtcgctgtttatcgtaacgtttctgcacttggtcatcggcgaaatggctccgaaatcctgggcaatcgcgcatccggagacggcacttcgaactatcgcgattcccgcacggggcttcattaacctgtttcgtccattgctgcagtggatcaacaaaatggcgaacgatttggtccgcaaagttggtgaaactcccgttgatcgagctgcagctggtggctatgacaccgataccctccatgccctcattgagcattcccgagaaactggcgctctggatcagcaatccgccgcccaaatcagcggaattatcaagctggataaaatcacggtcggtcaaaccctgaccgcatctccatttacgcacagcgccagcgccacggttgctgaggtgcaagccgcagctcagcgcagtggcagcttgcgtgtgcttatcgacgccccctcccaccttttcccacacgtcattcatgtgcgagacacccttggtgcctcgccagacgagaaggcttcgaagtggtctcgcccaatcctcaccgttgctgagaccgacacgttacaccaagcgctggaatacatgcgggagcataacgagcagatcagtgcggtgctttccgctgatgggaaaacggtgcttggtgtaataacttgggatcacatcttgaaatacctgtggcctgcatcggtgtagctaatttgaggtgcgctgaa

SEQ ID NO: 580 - protein, 336 aa, Corynebacterium glutamicum
MTEWYVVLPATILLIALSAFFVIIEFALLAARRNRLEETVETSRSSRAALRSLNELTLMLAGAQLGITMVTFALGAITKPWVHYALMPLFEWARIPLVMADVIAFILSLFIVTFLHLVIGEMAPKSWAIAHPETALRTIAIPARGFINLFRPLLQWINKMANDLVRKVGETPVDRAAAGGYDTDTLHALIEHSRETGALDQQSAAQISGIIKLDKITVGQTLTASPFTHSASATVAEVQAAAQRSGSLRVLIDAPSHLFPHVIHVRDTLGASPDEKASKWSRPILTVAETDTLHQALEYMREHNEQISAVLSADGKTVLGVITWDHILKYLWPASV

SEQ ID NO: 581 - DNA, 1107 bp, Corynebacterium glutamicum
  CDS (77)..(1084): FRXA01306
cgtgcctgtaaaatgcgctcgctctgctgaagaccacccagacaatcaccccgctccgaaggagaatcgataagccatgactgaatggtatgtcgttttacccgccactattctactcatcgcgctgtctgcgtttttcgtcatcattgagttcgctttgcttgcagctaggcggaaccggttagaggagactgtggaaacctcgcggtcttcccgcgctgcgttgcgaagcctcaatgaacttactctcatgctcgcgggcgcgcagttgggaatcaccatggtgactttcgcgttgggtgctatcacgaagccgtgggttcattatgctttgatgccgctcttcgaatgggcgcgtataccgctggttatggcagatgtcattgcgtttattttgtcgctgtttatcgtaacgtttctgcacttggtcatcggcgaaatggctccgaaatcctgggcaatcgcgcatccggagacggcacttcgaactatcgcgattcccgcacggggcttcattaacctgtttcgtccattgctgcagtggatcaacaaaatggcgaacgatttggtccgcaaagttggtgaaactcccgttgatcgagctgcagctggtggctatgacaccgataccctccatgccctcattgagcattcccgagaaactggcgctctggatcagcaatccgccgcccaaatcagcggaattatcaagctggataaaatcacggtcggtcaaaccctgaccgcatctccatttacgcacagcgccagcgccacggttgctgaggtgcaagccgcagctcagcgcagtggcagcttgcgtgtgcttatcgacgccccctcccaccttttcccacacgtcattcatgtgcgagacacccttggtgcctcgccagacgagaaggcttcgaagtggtctcgcccaatcctcaccgttgctgagaccgacacgttacaccaagcgctggaatacatgcgggagcataacgagcagatcagtgcggtgctttccgctgatgggaaaacggtgcttggtgtaataacttgggatcacatcttgaaatacctgtggcctgcatcggtgtagctaatttgaggtgcgctgaa

SEQ ID NO: 582 - protein, 336 aa, Corynebacterium glutamicum; identical to SEQ ID NO: 580

SEQ ID NO: 583 - DNA, 423 bp, Corynebacterium glutamicum
  CDS (101)..(400): RXN01324
tcctcaacccaatgcttgccggcattgcgatggccttcagttcagttttcgtcgtctccaattccttgcgtctgcgaggattcaaagcaaggagcaactaatgtccaacagcgaatgccacacccacggttacatcgaagaaaagcagcgttacctcgcacgcctcaaaagaatcgaaggccaaacccgaggcattcaccgcatgatcgacgaggaacaatactgcatcgacatcctcacgcagatctccgcagtgaactccgcactcaaaaacgtggcgttcggcctcctcgacgatcacctcgctcactgtgtcaaagaagcagctgacctcggcggcgacgaactcgacgcaaaactcaaagaagtttccgacgccatcgcccgcttcagtaaggcctaaacggatccggtggcattgga

SEQ ID NO: 584 - protein, 100 aa, Corynebacterium glutamicum
MSNSECHTHGYIEEKQRYLARLKRIEGQTRGIHRMIDEEQYCIDILTQISAVNSALKNVAFGLLDDHLAHCVKEAADLGGDELDAKLKEVSDAIARFSKA

SEQ ID NO: 585 - DNA, 2520 bp, Corynebacterium glutamicum
  CDS (101)..(2497): RXN01331
ctaaactcgtctctcgtatctttcagtcatttatgtctgataagcaggcgcgtgcgccacacaattggcacaatcacaagaaagtgaagtgggaacctagatgctgacgacactatggattgcggtgttggtatttaccgttccaggattggtcgtctcgtgggtttctggccttaaagtgccctgggctatcgcagcctccatcccagccaccttcggtatttacggcctgtccgcctggttgctgggcttgtgggagatgcgttttgatctccattctgtagttatttccacattggttttcgctgcggttgctttggtatggcgcttgttttttgtcggtggttggcttgtacgtcggcgtaaagcacgtatccgcaggcagacgctcgcggatgaagagcgggcagaaaatgctgaggtatctgcaggggagcctgccgaatcgagcacaaacgaagcagccgaatctgaatctgaaacctcggagcgtcgcggaatctggcgcgtgatctttgattacatgcgcgacggtggcatcttggatcaccgttggctgctgcctgccgcaggtgctatcactggtgcgtggctgatcattgatcgtgccgttgatctgctcttgagcaccgagcatggtttgggcgatatcgtccaaggctgggatgtccattggcatgcttcgactgtccgttttatagatgagaccggcattgcgtcatccacgatgatggggcagctgcgcaatattgaaacgcagcaagatctgttctacccaagcgcatggcatgctggtgcatgggtgctgtcggatgtcggaaatctgacgattgttgaagccaccaacctcactggcattgtgctgtccggattgttgctgccgttagctgttgcactgattgcatggcggatgatcaacaatcgtggactgaccgcgcagattggtgcgggctttgctggactgatcaccattgcctctccggtactgttctgggttggtaactacgtgggtgcgtggccttatgttgctgcgatcggtgcttcaggtgtggtgcttgcgctgtttatgtccactccgtctgtgccggtaagaatctttgccgcagcattggcgttcatgggtatgttccagctgcatccagccccatccaccatcgtgatcatggtgttgctgctgtggtggctgctcaaactcgtggtggttccaagccagaaagtgaagggctggaaggcgggcatcggtatccgtttgaaggatgtcggcatcctggccatcacgggcatcatcggtgtgctcttcatgctgcctcaggtgatttcaggttccgaacaaaccgaagatgtgctgtcatattctgctgaggaacaagtcacccgcagcgagtcctggttggtgtctattttcatggagacccgccatgttgatttcttcggaaatattgacatcgtcccagtgctggtattcgcagcaatcggtggcgtggttgctttggtgtggcgcggaaacttgtgggcgccggtgttttacttcgccagcgttgcgttgaccgctaactcgctgaagccttttgaagagccgtggggtgattggctcaacatcgtgggcggtctgcattactccacaggacaccgtttgatcatgcctgtcgccatgttcacttttgctgccgcaggtatcggcgctgccgcagtgatccgtttgatctgcttgggaccaataaagaagttcaccactgtttccggtgttgtttctgtggtgatggctcttgttgtggctgtgccattgcagacttgggcgaaggattttgtagaggaaggatccgaaaccacaatccttgcgccacacaatgatgaacgtatggtgagcaacaacgacttggctgcctgggactggttaatccaacagccaggtggagctgacatgaacatcatgggtgaccccgcagatggtaacggctggatgtatgcctacaacggcttgcactccgtggcccgccactatgcatggccagcagcaggcgaaggctctgccaccgcgatgctgttctggtggcctcaacttctaggtgtgggcaccgatgaaaacccagatcaagtcaacgatgtggatcaggctgctcgtgatctcaacgtcggctacttcatgatcagtccgtggacgttctgggatttccagatccccaacttccgccagatcgatctgctgtggcaaaccccaggcgtgacaccggtgtgcaagaagggcgactcggtgatcttcgcagtcaacgatatgttcactgacgccgaactggatcagatgcgtgcacctggtaattctccagaaccactgccagagcttcctaccttgggcgagcttgggttggctgaaactgaagacgaggtagatcagacttattaccatcgtccaacggttcctgctggtgtgaactcagagatgccttcagccgaaactctgtatgcaccggatccaacgaagccgcatacggtccctaactaatcacaaagagtattcagtaa

SEQ ID NO: 586 - protein, 799 aa, Corynebacterium glutamicum
MLTTLWIAVLVFTVPGLVVSWVSGLKVPWAIAASIPATFGIYGLSAWLLGLWEMRFDLHSVVISTLVFAAVALVWRLFFVGGWLVRRRKARIRRQTLADEERAENAEVSAGEPAESSTNEAAESESETSERRGIWRVIFDYMRDGGILDHRWLLPAAGAITGAWLIIDRAVDLLLSTEHGLGDIVQGWDVHWHASTVRFIDETGIASSTMMGQLRNIETQQDLFYPSAWHAGAWVLSDVGNLTIVEATNLTGIVLSGLLLPLAVALIAWRMINNRGLTAQIGAGFAGLITIASPVLFWVGNYVGAWPYVAAIGASGVVLALFMSTPSVPVRIFAAALAFMGMFQLHPAPSTIVIMVLLLWWLLKLVVVPSQKVKGWKAGIGIRLKDVGILAITGIIGVLFMLPQVISGSEQTEDVLSYSAEEQVTRSESWLVSIFMETRHVDFFGNIDIVPVLVFAAIGGVVALVWRGNLWAPVFYFASVALTANSLKPFEEPWGDWLNIVGGLHYSTGHRLIMPVAMFTFAAAGIGAAAVIRLICLGPIKKFTTVSGVVSVVMALVVAVPLQTWAKDFVEEGSETTILAPHNDERMVSNNDLAAWDWLIQQPGGADMNIMGDPADGNGWMYAYNGLHSVARHYAWPAAGEGSATAMLFWWPQLLGVGTDENPDQVNDVDQAARDLNVGYFMISPWTFWDFQIPNFRQIDLLWQTPGVTPVCKKGDSVIFAVNDMFTDAELDQMRAPGNSPEPLPELPTLGELGLAETEDEVDQTYYHRPTVPAGVNSEMPSAETLYAPDPTKPHTVPN

SEQ ID NO: 587 - DNA, 638 bp, Corynebacterium glutamicum
  CDS (40)..(615): FRXA01331
gcctcggactggttaatccaacagccaggtggagctgacatgaacatcatgggtgaccccgcagatggtaacggctggatgtatgcctacaacggcttgcactccgtggcccgccactatgcatggccagcagcaggcgaaggctctgccaccgcgatgctgttctggtggcctcaacttctaggtgtgggcaccgatgaaaacccagatcaagtcaacgatgtggatcaggctgctcgtgatctcaacgtcggctacttcatgatcagtccgtggacgttctgggatttccagatccccaacttccgccagatcgatctgctgtggcaaaccccaggcgtgacaccggtgtgcaagaagggcgactcggtgatcttcgcagtcaacgatatgttcactgacgccgaactggatcagatgcgtgcacctggtaattctccagaaccactgccagagcttcctaccttgggcgagcttgggttggctgaaactgaagacgaggtagatcagacttattaccatcgtccaacggttcctgctggtgtgaactcagagatgccttcagccgaaactctgtatgcaccggatccaacgaagccgcatacggtccctaactaatcacaaagagtattcagtaa

SEQ ID NO: 588 - protein, 192 aa, Corynebacterium glutamicum
MNIMGDPADGNGWMYAYNGLHSVARHYAWPAAGEGSATAMLFWWPQLLGVGTDENPDQVNDVDQAARDLNVGYFMISPWTFWDFQIPNFRQIDLLWQTPGVTPVCKKGDSVIFAVNDMFTDAELDQMRAPGNSPEPLPELPTLGELGLAETEDEVDQTYYHRPTVPAGVNSEMPSAETLYAPDPTKPHTVPN

SEQ ID NO: 589 - DNA, 892 bp, Corynebacterium glutamicum
  CDS (101)..(892): FRXA00668
ctaaactcgtctctcgtatctttcagtcatttatgtctgataagcaggcgcgtgcgccacacaattggcacaatcacaagaaagtgaagtgggaacctagatgctgacgacactatggattgcggtgttggtatttaccgttccaggattggtcgtctcgtgggtttctggccttaaagtgccctgggctatcgcagcctccatcccagccaccttcggtatttacggcctgtccgcctggttgctgggcttgtgggagatgcgttttgatctccattctgtagttatttccacattggttttcgctgcggttgctttggtatggcgcttgttttttgtcggtggttggcttgtacgtcggcgtaaagcacgtatccgcaggcagacgctcgcggatgaagagcgggcagaaaatgctgaggtatctgcaggggagcctgccgaatcgagcacaaacgaagcagccgaatctgaatctgaaacctcggagcgtcgcggaatctggcgcgtgatctttgattacatgcgcgacggtggcatcttggatcaccgttggctgctgcctgccgcaggtgctatcactggtgcgtggctgatcattgatcgtgccgttgatctgctcttgagcaccgagcatggtttgggcgatatcgtccaaggctgggatgtccattggcatgcttcgactgtccgttttatagatgagaccggcattgcgtcatccacgatgatggggcagctgcgcaatattgaaacgcagcaagatctgttctacccaagcgcatggcatgctggtgcatgggtgctgtcggatgtcggaaatctgacgattgttgaagccaccaacctcactggcattgtgctgtccggattgttgctgccgttagctgtt

SEQ ID NO: 590 - protein, 264 aa, Corynebacterium glutamicum
MLTTLWIAVLVFTVPGLVVSWVSGLKVPWAIAASIPATFGIYGLSAWLLGLWEMRFDLHSVVISTLVFAAVALVWRLFFVGGWLVRRRKARIRRQTLADEERAENAEVSAGEPAESSTNEAAESESETSERRGIWRVIFDYMRDGGILDHRWLLPAAGAITGAWLIIDRAVDLLLSTEHGLGDIVQGWDVHWHASTVRFIDETGIASSTMMGQLRNIETQQDLFYPSAWHAGAWVLSDVGNLTIVEATNLTGIVLSGLLLPLAV

SEQ ID NO: 591 - DNA, 750 bp, Corynebacterium glutamicum
  CDS (1)..(750): FRXA00674
atctttgccgcagcattggcgttcatgggtatgttccagctgcatccagccccatccaccatcgtgatcatggtgttgctgctgtggtggctgctcaaactcgtggtggttccaagccagaaagtgaagggctggaaggcgggcatcggtatccgtttgaaggatgtcggcatcctggccatcacgggcatcatcggtgtgctcttcatgctgcctcaggtgatttcaggttccgaacaaaccgaagatgtgctgtcatattctgctgaggaacaagtcacccgcagcgagtcctggttggtgtctattttcatggagacccgccatgttgatttcttcggaaatattgacatcgtcccagtgctggtattcgcagcaatcggtggcgtggttgctttggtgtggcgcggaaacttgtgggcgccggtgttttacttcgccagcgttgcgttgaccgctaactcgctgaagccttttgaagagccgtggggtgattggctcaacatcgtgggcggtctgcattactccacaggacaccgtttgatcatgcctgtcgccatgttcacttttgctgccgcaggtatcggcgctgccgcagtgatccgtttgatctgcttgggaccaataaagaagttcaccactgtttccggtgttgtttctgtggtgatggctcttgttgtggctgtgccattgcagacttgggcgaaggattttgtagaggaaggatccgaaaccacaatccttgcgcca

SEQ ID NO: 592 - protein, 250 aa, Corynebacterium glutamicum
IFAAALAFMGMFQLHPAPSTIVIMVLLLWWLLKLVVVPSQKVKGWKAGIGIRLKDVGILAITGIIGVLFMLPQVISGSEQTEDVLSYSAEEQVTRSESWLVSIFMETRHVDFFGNIDIVPVLVFAAIGGVVALVWRGNLWAPVFYFASVALTANSLKPFEEPWGDWLNIVGGLHYSTGHRLIMPVAMFTFAAAGIGAAAVIRLICLGPIKKFTTVSGVVSVVMALVVAVPLQTWAKDFVEEGSETTILAP

SEQ ID NO: 593 - DNA, 1536 bp, Corynebacterium glutamicum
  CDS (101)..(1513): RXN01337
gctggctatcctcaattccgctcgggtcgcactgccacgcggagcgattagtgattttgatacgcaagaaaaagtttcttagcagggtaacctaaatgtcgtgacatttcgaggcggaaacactggcgcaaagcacgcggtcgttgttggttctggccccaatgggttgaccacggcggcggtgctggccaaagcaggttggcaagtagatgtgtatgaggcggcgccaacccctggaggggcggcgcgctcagaaagcgttctgggggaggggactatcagcgatttgggtgccgcagggcatcctttcggggtggcaagcccagcttttcactatttgggtctggaagatcacggcctggaatgggcgtattctccctttgcgatggcccacccgttagattatggcagggccggactgctggaaacgtcactcccagagaccgccaaaaagcttggacctgatgcacgtcgttggaagaatttgcaccagggcttaaccaaaaacattgataaacacttggccaatctattagggccggtgctgaaatggccagcacatccgattcggatggcaaagtttggcccatttgcgttgctgcccgcgaaacgtctagccagtgccgcttttgaaacagaagaagcccgatccctgtttatcggttcggcgatgcactcggtgactccaccacacaagccgatgaccgcatcacttggattgctttttggcgctctggggatgtcgcgaggatggccggttgcagttgggggaagcggacggatcgtcgatgctctggtcaatgtcataaaccatcacggtggcaccattcactgcgattcacagattgattccctctcacaattccgcgacaccgatgccattattctgaaccaaaccccctcacaggtgctgaaactcaaaggaactgaccttaatgcagggcttccgcaacgcatgagcacctggaaacacggaccaagttcctacaaagtggactacctccttgacgaaccaattccctggagcaatccccaggtaggccaggccacaaccgtccatgtgggcggaagctctgaggaaatcgctttcgcagaagcagaagtcgcagcggggcggatgcccgaacgcccgtttatcattttgtgccaacaacaagtggcggatccttcacgcgcccgggaggggcgccacgtcgtgtgggcctacgcgcatgtgccgcggggtttcgtcgataagcgagctgctttattaatcactgcgcagattgaacgcttcgcccccggtttccgtgatcgcatcgtgcattcagtggataccaacgcggaggatttagaggcgtggaaccccaatcttgttggcggagacatcaccgcagggtccgcgctgcttcggcgaatgccgaccaaaatcggcgagaaaacgtacatggcatccgcctccaacgcgccgggcgggggagtccacggaatgcccggctggtgggcagcgcaagccgttttagcagatcacaggtagaattgcgacatggagcccac

SEQ ID NO: 594 - protein, 471 aa, Corynebacterium glutamicum
VTFRGGNTGAKHAVVVGSGPNGLTTAAVLAKAGWQVDVYEAAPTPGGAARSESVLGEGTISDLGAAGHPFGVASPAFHYLGLEDHGLEWAYSPFAMAHPLDYGRAGLLETSLPETAKKLGPDARRWKNLHQGLTKNIDKHLANLLGPVLKWPAHPIRMAKFGPFALLPAKRLASAAFETEEARSLFIGSAMHSVTPPHKPMTASLGLLFGALGMSRGWPVAVGGSGRIVDALVNVINHHGGTIHCDSQIDSLSQFRDTDAIILNQTPSQVLKLKGTDLNAGLPQRMSTWKHGPSSYKVDYLLDEPIPWSNPQVGQATTVHVGGSSEEIAFAEAEVAAGRMPERPFIILCQQQVADPSRAREGRHVVWAYAHVPRGFVDKRAALLITAQIERFAPGFRDRIVHSVDTNAEDLEAWNPNLVGGDITAGSALLRRMPTKIGEKTYMASASNAPGGGVHGMPGWWAAQAVLADHR

SEQ ID NO: 595 - DNA, 1536 bp, Corynebacterium glutamicum; identical to SEQ ID NO: 593
  CDS (101)..(1513): FRXA01337

SEQ ID NO: 596 - protein, 471 aa, Corynebacterium glutamicum; identical to SEQ ID NO: 594

SEQ ID NO: 597 - DNA, 708 bp, Corynebacterium glutamicum
  CDS (101)..(685): RXN01351
ctggagatttccgatttccagcgcgcccgcatcgacgcgaatgctcaggaattgcaggccgagcgcgaggcagtgcgcgacttgctctaatctttaacgcatgacttcgcttttcgacgccccaaccctccaacgcgtcaccgttttcacgggctcggcgctcggcagttcctcgctgtacacgcaagcggctcaaaccttggcgaaaaccgcggtagaccgcggcatcgacttggtttacggtggcggaaaagtggggctcatgggtatcgtcgcggatgcgttcctggaatcaggtggcgaagcctttggcgtcatcacggaatcacttatgaagggtgagcttgggcatgaaaagctcaccgaacttgaaatcgttcctgatatgcacatccgcaagcgtcgcatggcagaacttggcgatggttttatcgccatgcccggtggcgccggcaccttggaagaacttttcgaggtctggacctggcaacagctgggcattcatcaaaagcccgtcgcactttatgatgtcgatggtttttggcagcccctgctggaaatgcttgagcagatgacccagcgtggatttatcaagcgagacttctttgagtgcctcatcgtggaatccgacccgcatgccctgctaaaggcaatgcagacctggactccaccagcaccaaaatggtaactaaattgtgtgctcgacgg

SEQ ID NO: 598 - protein, 195 aa, Corynebacterium glutamicum
MTSLFDAPTLQRVTVFTGSALGSSSLYTQAAQTLAKTAVDRGIDLVYGGGKVGLMGIVADAFLESGGEAFGVITESLMKGELGHEKLTELEIVPDMHIRKRRMAELGDGFIAMPGGAGTLEELFEVWTWQQLGIHQKPVALYDVDGFWQPLLEMLEQMTQRGFIKRDFFECLIVESDPHALLKAMQTWTPPAPKW

SEQ ID NO: 599 - DNA, 3677 bp, Corynebacterium glutamicum
  CDS (1)..(3654): RXN01362
aaatggcttggcacgcctgcgcagagcttattcttaatccccccagttacccagcatgctcgcacgggcacccacctttatgattccctgcagctgctgttcactctggtggataaaggccaccacccaacagatgctaaggctgtagcttttgatgccgaggctggagaagaaggcctgcacttccgcaacctttcagcggatctcttcctccctgcagccacagaacttattgatcgagttggtctttccaatgaagccctaaacaaggtcttggaaaacctcctgctctcccgggtgcaatccggtaaagaccgcggctttatctcctatgccaccttgggtgttaccgagcttggccaagtttatgagggtctgatgtcctataccggctttatcgcccaggaagatctttttgaggttgcaccacatggcaaagccgataaaggttcctggatgctcccggtctcaaaggctgatgaagtccctgccgatagctttatcgaagttgatcaagaagcccctggtggcggcgtaatcaaggtgcgtaaacgccacccgcgcggatcatttgtgttccgtcagtcctctcgtgaccgcgaacgctcagcgtccttctacaccccacaagtactcaccagctttactgtcacccaggctattgaagaactccaggcatcaaagcgcatcaccacagccaatgatgttctcagcctcaccatctgtgaacctgccatgggttccggcgccttcgctgtggaagcagtacgccaattagcagagctttatttggaattgcgccaagaagaactagagcagcagattccagcggaagaccgtgccaaggaactccaaaaggtcaaagcgcacattgcgctgcaccaggtttatggtgtggaccttaacagcactgctgtggagttggcggaaatctcgctgtggctagacaccatgaatgcagaaatggacgcaccttggtatggcctgcacctgcgtaatggtaactccctcgttggtgccacccgttcgctgtatgcacctagtctgcttaataaaaaagcctggttaactgctactccaacccgctatcggcttgatgatatcgcgcaggctattgatgaaaacaaagcagaacccctcttcaaccacggcatccaccacttcctcttgccctctactggctggggagccactgcagatgccaaagatcttaaagatcttatggctactgaaatcaaggagcttaaatcttggcgtacttccatccgtgcgtctttgagtaaaactcagattaagcagctcaataaccttgccctacgcgtggaaacactatggcgatttgtgctgatgcgtattcgcattgcagaatcccagatctcacgtagcactactctctggggtcaagagccagctgaggtttcggaggttgtcacacgtgagcaaattgaacaagacctctttggcaatattgatggtgcatataaccgtctacgcttggtgatggatgcttggtgtgcgctgtggttctggcctttggatgctgttgctaccgctgagcatccggagcgtccagcccttccagatcttgatgagtggctagccaccctgacggagattctgggtattgatctccctctgaagtccaaaaacgaaaatcagattgtcttaggtccagataccaattggctagccattaatgatgccgaggctactgatcttggtttttctggggcattgagctttgagcgtgttagcgcgaatcacccgtggatcaatgttgcccgccaagtggctaaacaacagagcttcttccactgggatctagacttcgcccacgtttttgccaagggtggatttgatctgcaggttggtaatccaccatgggtgcgaccagatgtgaactttgaggatctgcttgctgaacatgatccgtggtgggctgtaatgagtaaaccaacccaggcatccaaaaaagaacgccagaagaattttcacaacaatcctaagagcctcgaacatgtggtcagtggtgcaggtgaacccgtggctacttctgcgatcctcggttcggttactctctatccgcatcttaaagatcaacgcccggacctctaccggggctttatggaaaagacttggtctaatgcctccccggcaggtgcgatctcactgatccaccccgaatcccacttcactgagaaaaaagctgccccgctacgtcggggagcatatgagcgtctgcgccgccactggcagttcattaatgagttgattctttttgacgtccacgacttggttaaatatggcgtacatgtctatggcgctccgcaggaatctattaactttttaagtgctgcgtcgctttatcacccacaaacagtgcttgattcatttgatcatgacggttcaggtaatctccctggtcttaaagacgacaatggcaactgggaccgtcgcccacacaaggaccgtatccaactggtcaatgccgatactttgacggtgtggaagtccatcctggaggatgaacaaacgccatacttggatacccgcatggtttataccgtcaacacggaagcagcagcagcgttggaaaagttggcttctgcacctcgtatcaaagaactcgggctgcagttctccagtggctggaatgaaaccaccgataagaaaaagggatactttgacgttggttggggctacccagcttcctggtctgatgccattttgcaggggccgcacctgggtgttgctacaccaatgatcaagcagcccaatccgacaatgaagcataatcaagattggtctgaaattgatttcgaggccattcctgcaaacttcatacctgcaacggcgtaccagcccgatcgccaaacaaagcccacttatgatgctgactacggcacctggactttcggggacaagcaggtaccagttgcagacactttccgaattgcatggagggagatggctgccaccacgggatttaggactgtctacccatcagtaattccaccgggagccaaccatgtgcacacagttaatagcgctgcatcacgttcaaacttaaaaaccattctcgttggagcacagcttggtgcaattctaagtgactattttgctcggtcctcgggttcaagccacatatttaacgacattgttcgcaagattccacttccaaatttcacatccttggaaaagcagttcgcccgcacatacctccgcctcaactgcctgacctcagcttatgccccattgtgggaagagatcaccggtgagccgtgggatgttcaggtgcctttgcgcaatgccgagcaacgtcgagcagcgcaaaacgatattgatgccatggtggcattgtctttgggtattagtgctgatgagctgtgcatgatttatcgcactcaattcccagtgatgcgtagatatgatcaagaagatcattttgatgccaatggccgtaaagttcctaaagagatcatcaagctgcagcagaaacttaaagatggccaagagctcagcgtggaaaagcgcacctgggtgcatccccaatcagaagtgtcctatacctttgaatatcctttccgggtgttggatcgtgaagctgatctgcgtgctgcatatgcaaaatttgaaaaccagcttaaggagccatagagcgcttatgtcctcactca

SEQ ID NO: 600 - protein, 1218 aa, Corynebacterium glutamicum
KWLGTPAQSLFLIPPVTQHARTGTHLYDSLQLLFTLVDKGHHPTDAKAVAFDAEAGEEGLHFRNLSADLFLPAATELIDRVGLSNEALNKVLENLLLSRVQSGKDRGFISYATLGVTELGQVYEGLMSYTGFIAQEDLFEVAPHGKADKGSWMLPVSKADEVPADSFIEVDQEAPGGGVIKVRKRHPRGSFVFRQSSRDRERSASFYTPQVLTSFTVTQAIEELQASKRITTANDVLSLTICEPAMGSGAFAVEAVRQLAELYLELRQEELEQQIPAEDRAKELQKVKAHIALHQVYGVDLNSTAVELAEISLWLDTMNAEMDAPWYGLHLRNGNSLVGATRSLYAPSLLNKKAWLTATPTRYRLDDIAQAIDENKAEPLFNHGIHHFLLPSTGWGATADAKDLKDLMATEIKELKSWRTSIRASLSKTQIKQLNNLALRVETLWRFVLMRIRIAESQISRSTTLWGQEPAEVSEVVTREQIEQDLFGNIDGAYNRLRLVMDAWCALWFWPLDAVATAEHPERPALPDLDEWLATLTEILGIDLPLKSKNENQIVLGPDTNWLAINDAEATDLGFSGALSFERVSANHPWINVARQVAKQQSFFHWDLDFAHVFAKGGFDLQVGNPPWVRPDVNFEDLLAEHDPWWAVMSKPTQASKKERQKNFHNNPKSLEHVVSGAGEPVATSAILGSVTLYPHLKDQRPDLYRGFMEKTWSNASPAGAISLIHPESHFTEKKAAPLRRGAYERLRRHWQFINELILFDVHDLVKYGVHVYGAPQESINFLSAASLYHPQTVLDSFDHDGSGNLPGLKDDNGNWDRRPHKDRIQLVNADTLTVWKSILEDEQTPYLDTRMVYTVNTEAAAALEKLASAPRIKELGLQFSSGWNETTDKKKGYFDVGWGYPASWSDAILQGPHLGVATPMIKQPNPTMKHNQDWSEIDFEAIPANFIPATAYQPDRQTKPTYDADYGTWTFGDKQVPVADTFRIAWREMAATTGFRTVYPSVIPPGANHVHTVNSAASRSNLKTILVGAQLGAILSDYFARSSGSSHIFNDIVRKIPLPNFTSLEKQFARTYLRLNCLTSAYAPLWEEITGEPWDVQVPLRNAEQRRAAQNDIDAMVALSLGISADELCMIYRTQFPVMRRYDQEDHFDANGRKVPKEIIKLQQKLKDGQELSVEKRTWVHPQSEVSYTFEYPFRVLDREADLRAAYAKFENQLKEP

SEQ ID NO: 601 - DNA, 1418 bp, Corynebacterium glutamicum
  CDS (1)..(1395): FRXA01362
attaatgagttgattctttttgacgtacacgacttggttaaatatggcgtacatgtctatggcgctccgcaggaatctattaactttttaagtgctgcgtcgctttatcacccacaaacagtgcttgattcatttgatcatgacggttcaggtaatctccctggtcttaaagacgacaatggcaactgggaccgtcgcccacacaaggaccgtatccaactggtcaatgccgatactttgacggtgtggaagtccatcctggaggatgaacaaacgccatacttggatacccgcatggtttataccgtcaacacggaagcagcagcagcgttggaaaagttggcttctgcacctcgtatcaaagaactcgggctgcagttctccagtggctggaatgaaaccaccgataagaaaaagggatactttgacgttggttggggctacccagcttcctggtctgatgccattttgcaggggccgcacctgggtgttgctacaccaatgatcaagcagcccaatccgacaatgaagcataatcaagattggtctgaaattgatttcgaggccattcctgcaaacttcatacctgcaacggcgtaccagcccgatcgccaaacaaagcccacttatgatgctgactacggcacctggactttcggggacaagcaggtaccagttgcagacactttccgaattgcatggagggagatggctgccaccacgggatttaggactgtctacccatcagtaattccaccgggagccaaccatgtgcacacagttaatagcgctgcatcacgttcaaacttaaaaaccattctcgttggagcacagcttggtgcaattctaagtgactattttgctcggtcctcgggttcaagccacatatttaacgacattgttcgcaagattccacttccaaatttcacatccttggaaaagcagttcgcccgcacatacctccgcctcaactgcctgacctcagcttatgccccattgtgggaagagatcaccggtgagccgtgggatgttcaggtgcctttgcgcaatgccgagcaacgtcgagcagcgcaaaacgatattgatgccatggtggcattgtctttgggtattagtgctgatgagctgtgcatgatttatcgcactcaattcccagtgatgcgtagatatgatcaagaagatcattttgatgccaatggccgtaaagttcctaaagagatcatcaagctgcagcagaaacttaaagatggccaagagctcagcgtggaaaagcgcacctgggtgcatccccaatcagaagtgtcctatacctttgaatatcctttccgggtgttggatcgtgaagctgatctgcgtgctgcatatgcaaaatttgaaaaccagcttaaggagccatagagcgcttatgtcctcactca

SEQ ID NO: 602 - protein, 465 aa, Corynebacterium glutamicum
INELILFDVHDLVKYGVHVYGAPQESINFLSAASLYHPQTVLDSFDHDGSGNLPGLKDDNGNWDRRPHKDRIQLVNADTLTVWKSILEDEQTPYLDTRMVYTVNTEAAAALEKLASAPRIKELGLQFSSGWNETTDKKKGYFDVGWGYPASWSDAILQGPHLGVATPMIKQPNPTMKHNQDWSEIDFEAIPANFIPATAYQPDRQTKPTYDADYGTWTFGDKQVPVADTFRIAWREMAATTGFRTVYPSVIPPGANHVHTVNSAASRSNLKTILVGAQLGAILSDYFARSSGSSHIFNDIVRKIPLPNFTSLEKQFARTYLRLNCLTSAYAPLWEEITGEPWDVQVPLRNAEQRRAAQNDIDAMVALSLGISADELCMIYRTQFPVMRRYDQEDHFDANGRKVPKEIIKLQQKLKDGQELSVEKRTWVHPQSEVSYTFEYPFRVLDREADLRAAYAKFENQLKEP

SEQ ID NO: 603 - DNA, 1866 bp, Corynebacterium glutamicum
  CDS (1)..(1866): FRXA01364
acgggcacccacctttatgattccctgcagctgctgttcactctggtggataaaggccaccacccaacagatgctaaggctgtagcttttgatgccgaggctggagaagaaggcctgcacttccgcaacctttcagcggatctcttcctccctgcagccacagaacttattgatcgagttggtctttccaatgaagccctaaacaaggtcttggaaaacctcctgctctcccgggtgcaatccggtaaagaccgcggctttatctcctatgccaccttgggtgttaccgagcttggccaagtttatgagggtctgatgtcctataccggctttatcgcccaggaagatctttttgaggttgcaccacatggcaaagccgataaaggttcctggatgctcccggtctcaaaggctgatgaagtccctgccgatagctttatcgaagttgatcaagaagcccctggtggcggcgtaatcaaggtgcgtaaacgccacccgcgcggatcatttgtgttccgtcagtcctctcgtgaccgcgaacgctcagcgtccttctacaccccacaagtactcaccagctttactgtcacccaggctattgaagaactccaggcatcaaagcgcatcaccacagccaatgatgttctcagcctcaccatctgtgaacctgccatgggttccggcgccttcgctgtggaagcagtacgccaattagcagagctttatttggaattgcgccaagaagaactagagcagcagattccagcggaagaccgtgccaaggaactccaaaaggtcaaagcgcacattgcgctgcaccaggtttatggtgtggaccttaacagcactgctgtggagttggcggaaatctcgctgtggctagacaccatgaatgcagaaatggacgcaccttggtatggcctgcacctgcgtaatggtaactccctcgttggtgccacccgttcgctgtatgcacctagtctgcttaataaaaaagcctggttaactgctactccaacccgctatcggcttgatgatatcgcgcaggctattgatgaaaacaaagcagaacccctcttcaaccacggcatccaccacttcctcttgccctctactggctggggagccactgcagatgccaaagatcttaaagatcttatggctactgaaatcaaggagcttaaatcttggcgtacttccatccgtgcgtctttgagtaaaactcagattaagcagctcaataaccttgccctacgcgtggaaacactatggcgatttgtgctgatgcgtattcgcattgcagaatcccagatctcacgtagcactactctctggggtcaagagccagctgaggtttcggaggttgtcacacgtgagcaaattgaacaagacctctttggcaatattgatggtgcatataaccgtctacgcttggtgatggatgcttggtgtgcgctgtggttctggcctttggatgctgttgctaccgctgagcatccggagcgtccagcccttccagatcttgatgagtggctagccaccctgacggagattctgggtattgatctccctctgaagtccaaaaacgaaaatcagattgtcttaggtccagataccaattggctagccattaatgatgccgaggctactgatcttggtttttctggggcattgagctttgagcgtgttagcgcgaatcacccgtggatcaatgttgcccgccaagtggctaaacaacagagcttcttccactgggatctagacttcgcccacgtttttgccaagggtggatttgatctgcaggttggtaatccaccatgggtgcgaccagatgtgaactttgaggatctgcttgctgaacatgat

SEQ ID NO: 604 - protein, 622 aa, Corynebacterium glutamicum
TGTHLYDSLQLLFTLVDKGHHPTDAKAVAFDAEAGEEGLHFRNLSADLFLPAATELIDRVGLSNEALNKVLENLLLSRVQSGKDRGFISYATLGVTELGQVYEGLMSYTGFIAQEDLFEVAPHGKADKGSWMLPVSKADEVPADSFIEVDQEAPGGGVIKVRKRHPRGSFVFRQSSRDRERSASFYTPQVLTSFTVTQAIEELQASKRITTANDVLSLTICEPAMGSGAFAVEAVRQLAELYLELRQEELEQQIPAEDRAKELQKVKAHIALHQVYGVDLNSTAVELAEISLWLDTMNAEMDAPWYGLHLRNGNSLVGATRSLYAPSLLNKKAWLTATPTRYRLDDIAQAIDENKAEPLFNHGIHHFLLPSTGWGATADAKDLKDLMATEIKELKSWRTSIRASLSKTQIKQLNNLALRVETLWRFVLMRIRIAESQISRSTTLWGQEPAEVSEVVTREQIEQDLFGNIDGAYNRLRLVMDAWCALWFWPLDAVATAEHPERPALPDLDEWLATLTEILGIDLPLKSKNENQIVLGPDTNWLAINDAEATDLGFSGALSFERVSANHPWINVARQVAKQQSFFHWDLDFAHVFAKGGFDLQVGNPPWVRPDVNFEDLLAEHD

SEQ ID NO: 605 - DNA, 1042 bp, Corynebacterium glutamicum
  CDS (101)..(1042): RXN01379
cagaaattgagtaatgctctcgagccagaccgtgaacttattaggcctttggccgtcattcttccgcagcccgcaactttgaacaccgaggtttaacacaatgagtgcatttgattcgatcctaaatgttgaagagtggatcagtgaccactacctcaccaatgacgatgccaaaggtgcctcattttccaagcgggtgcgcgagcgcattaaagaatggaaaaccaccgaggacgcaacccagcagagtggccctttaactcgtttttccagcaaccgcctgcagttgcagcatgctctttctgagcttgacgacgccaccaccgccgccagtttagtggcctctgcactggggtatggtgtccccagcgcgcgccacgcgcagcgcggctccgacacaatatcctattcctcttgggtgggaaatgccggcagtgtggaatttcttgcagcgactcccgctgaaagctttgaagagaacttccgatcccttccccttgagccagtagcggtcaatgacaagccccaggatatcaccgcagccaaattggtgggccagattttccttagtgatactccccctgcttttgttgttatcaccgctggtaaatgggtggttttagccgagcgtgaaacctggcctctaggccgccacctagctattgatatttccctggtggtggaacgtaatgacaccaaagcccagggtgagatgcagcagacggtcgtagcactagcccgcgaaaataccgagcgtgccgccgatggcaccacctggtgggaagaaaccattgagcaatcccgcgaacatgctgtcaaggtttctggcgagctacgcagtgcggtgcgtgaatccattgaaatcctgggcaatgacgtgctcacacgctatgaagctaaagagctctccaccgctgagatcgacggtggcgagctagctaagcaatctttgcgctatctctaccgcattttgttcctgctttttgccgaggcttcaccagagcttgaaatcctgccaaccggcaccccggaatatgacgag

SEQ ID NO: 606 - protein, 314 aa, Corynebacterium glutamicum
MSAFDSILNVEEWISDHYLTNDDAKGASFSKRVRERIKEWKTTEDATQQSGPLTRFSSNRLQLQHALSELDDATTAASLVASALGYGVPSARHAQRGSDTISYSSWVGNAGSVEFLAATPAESFEENFRSLPLEPVAVNDKPQDITAAKLVGQIFLSDTPPAFVVITAGKWVVLAERETWPLGRHLAIDISLVVERNDTKAQGEMQQTVVALARENTERAADGTTWWEETIEQSREHAVKVSGELRSAVRESIEILGNDVLTRYEAKELSTAEIDGGELAKQSLRYLYRILFLLFAEASPELEILPTGTPEYDE

SEQ ID NO: 607 - DNA, 921 bp, Corynebacterium glutamicum
  CDS (1)..(921): FRXA01379
ctaaatgttgaagagtggatcagtgaccactacctcaccaatgacgatgccaaaggtgcctcattttccaagcgggtgcgcgagcgcattaaagaatggaaaaccaccgaggacgcaacccagcagagtggccctttaactcgtttttccagcaaccgcctgcagttgcagcatgctctttctgagcttgacgacgccaccaccgccgccagtttagtggcctctgcactggggtatggtgtccccagcgcgcgccacgcgcagcgcggctccgacacaatatcctattcctcttgggtgggaaatgccggcagtgtggaatttcttgcagcgactcccgctgaaagctttgaagagaacttccgatcccttccccttgagccagtagcggtcaatgacaagccccaggatatcaccgcagccaaattggtgggccagattttccttagtgatactccccctgcttttgttgttatcaccgctggtaaatgggtggttttagccgagcgtgaaacctggcctctaggccgccacctagctattgatatttccctggtggtggaacgtaatgacaccaaagcccagggtgagatgcagcagacggtcgtagcactagcccgcgaaaataccgagcgtgccgccgatggcaccacctggtgggaagaaaccattgagcaatcccgcgaacatgctgtcaaggtttctggcgagctacgcagtgcggtgcgtgaatccattgaaatcctgggcaatgacgtgctcacacgctatgaagctaaagagctctccaccgctgagatcgacggtggcgagctagctaagcaatctttgcgctatctctaccgcattttgttcctgctttttgccgaggcttcaccagagcttgaaatcctgccaaccggcaccccggaatatgacgag

SEQ ID NO: 608 - protein, 307 aa, Corynebacterium glutamicum
LNVEEWISDHYLTNDDAKGASFSKRVRERIKEWKTTEDATQQSGPLTRFSSNRLQLQHALSELDDATTAASLVASALGYGVPSARHAQRGSDTISYSSWVGNAGSVEFLAATPAESFEENFRSLPLEPVAVNDKPQDITAAKLVGQIFLSDTPPAFVVITAGKWVVLAERETWPLGRHLAIDISLVVERNDTKAQGEMQQTVVALARENTERAADGTTWWEETIEQSREHAVKVSGELRSAVRESIEILGNDVLTRYEAKELSTAEIDGGELAKQSLRYLYRILFLLFAEASPELEILPTGTPEYDE

SEQ ID NO: 609 - DNA, 780 bp, Corynebacterium glutamicum
  CDS (101)..(757): RXN01390
cgtccagataatcaatctgcgaagccagtggcttccgaagctccaacaactattacgccggcaagctctggtgcattagcatccgatgctccgacgtcttatgttcaggcgcagccttcccagcaacaagacatcctcagcaagttccgccagctccgccgacacaagttactcagtcagattaggccgtcctgaagagcctggttaccagccagaaccgtcttattcggagccttacactgactctgatttcgcgccagcaggtgcggccgctgcggcagctgcagtagctccaccaatgattgcggaacagccacaaattgttgaagatgcccgccgaggtaccctcgatttcggcctgttgattatccgcgcagtcattggtgtctatttgatcgtccgtggagtctttacattcttcacccttggaggatctgccggtcttgctggcctcgaggcagagttcgctggttaccagtggcctgaaatcctcgcgatcctgcttccatctattgaacttgcggctggtgtcttcctgctccttggtctgatgaccccagtggcagcagcggtagccacggtggcgacatcctttaccacccttcaccaagtcaacactcatgaaggtggttggggtgaacttagtgagccattgatgctggcactgatcctcactatcgtggttgtcggacttcagttcaccggccccggcaagatttcccttgactctggccgaggttggcaaagcgtccactggtgagctcgtggatcttcgtggtc

SEQ ID NO: 610 - protein, 219 aa, Corynebacterium glutamicum
MFRRSLPSNKTSSASSASSADTSYSVRLGRPEEPGYQPEPSYSEPYTDSDFAPAGAAAAAAAVAPPMIAEQPQIVEDARRGTLDFGLLIIRAVIGVYLIVRGVFTFFTLGGSAGLAGLEAEFAGYQWPEILAILLPSIELAAGVFLLLGLMTPVAAAVATVATSFTTLHQVNTHEGGWGELSEPLMLALILTIVVVGLQFTGPGKISLDSGRGWQSVHW

SEQ ID NO: 611 - DNA, 780 bp, Corynebacterium glutamicum; identical to SEQ ID NO: 609
  CDS (101)..(757): FRXA01390

SEQ ID NO: 612 - protein, 219 aa, Corynebacterium glutamicum; identical to SEQ ID NO: 610

SEQ ID NO: 613 - DNA, 813 bp, Corynebacterium glutamicum
  CDS (101)..(790): RXN01391
atggtgtgaaaccatcatggctcgatcacaaaaaagaacacctgctatcaggtcaaccaaaaaagttaaaagtgtaatatccagcatcatcacgattgccgtggctgcagtcgcttttgcagcttacgttatagatggtggggtagaagaggcgtctggaacaccgacgtcttcggaaagctcggtagcggcaactgctccagcggcatctagcgagactgcggctgaataccgtgcgatgctcgcttcccttgacgttaaaggtcgtgcgccaggaacaggatatgaccgcgaattattcggaccagcatggaccgacactgtttccgtggaatatggacacaatggctgcgatacccgcaacgacatcctgcaacgcgacctggatgacatccaacttcgcgaaggcaccaaggattgtatcgtcacgagcggcctgctcagcgatccattttctggcgaacttattgatttcgttcgcggtgaacgttccggcgacgtgcagatcgatcacctggtcccattacatgacgcatgggtcaagggagcacagcagtgggatgagcaaactcgaaagaactttgccaacgatcccgacaaccttctcgccgttaaaggtacgcttaaccagcaaaaaggtgcaggcgatgcagcaacctggcttccaccaaacacagcttttaggtgcgattacgcaaagaaaatcatcaccgttaaagatcgctacaacgtgtgggtgactgaggctgaagcaagcgccctggaacgccaattagatacgtgtgctgcataacagtcacataagcatttggg

SEQ ID NO: 614 - protein, 230 aa, Corynebacterium glutamicum
VAAVAFAAYVIDGGVEEASGTPTSSESSVAATAPAASSETAAEYRAMLASLDVKGRAPGTGYDRELFGPAWTDTVSVEYGHNGCDTRNDILQRDLDDIQLREGTKDCIVTSGLLSDPFSGELIDFVRGERSGDVQIDHLVPLHDAWVKGAQQWDEQTRKNFANDPDNLLAVKGTLNQQKGAGDAATWLPPNTAFRCDYAKKIITVKDRYNVWVTEAEASALERQLDTCAA

SEQ ID NO: 615 - DNA, 813 bp, Corynebacterium glutamicum; identical to SEQ ID NO: 613
  CDS (101)..(790): FRXA01391

SEQ ID NO: 616 - protein, 230 aa, Corynebacterium glutamicum; identical to SEQ ID NO: 614

SEQ ID NO: 617 - DNA, 1623 bp, Corynebacterium glutamicum
  CDS (101)..(1600): RXN01400
gagcagctatcacccttatgcatcggctccgggtgaggcggtgccggtgtcctttgatcagcaacgacatgtgggtgccggcgagcgaccgggtagttggatggcgattagtgtttctatgcctaaggcgatcagccgtgaggaattggagcgcgcgtggcttgaagtgattgaacggcacggcaccttgcgcacagtatttagcacgggaatgggtggggaagtgcagcaacaccgcattgatgtgggcccgggaaaatggattgaccacgccgttgcgcctggtgagagcattaatgaggcgttgcgggcggtgttgaatcggcagtgttcgccgtactcgaggccatcgcatagtttgtgcattattgatgcgcatccgcgtcccacggtgattattggtagtgatcattcgcatgtggatatgtggtccatgctggtgattgtgcgcgatttgttggctgcgctcgatatggaacttcccgttgagccgccgttggcgtttgaatcgcacaccgcggaactcctcgcggctccacctgcaccggagcggattcaccagcggtggcgtgaaattttggaagctggtggtggaaaaatgcctcagttcccgcttccgcttggcgatgccatctccatgcctgaacgcgttgaagtccgcgacattttcggggtcaatggcttggcgatttactcggcacgcgcccgcgcacaacaggtaagctccctggccttgactatttcagtgatggctgatgttacggcggcgctggcggaccttccgttgcgtgctgtattcccagtccatagccgtttcgatcagcgctggcacgatagtgtcgggtggtttatctccaattcggtcattgaggtgccagattccgatcctcacactgcagcccaagctgttcgcgaggctgtttctttgggaagctacccgctggctgagctgcttgaaccgtggggtggcatgccggaaacgccaggaatgtttgctatttcttggcttgacctgcgccgactcccagtgagcattgacgatattggcctccaagcccagtatgtcagcgcttcactgcgcaccgatggtgtgatgctgtggtttattttggatcgctccggcgcgcaccttcgctgtcgttatcctgactctttggtggcgcgggaaaatgtaggccgctggattgatgcgattgttgctcagatgcgcgccgaagctgggacggtgaatctgcaggccggcggggaacagctgacacttcggcatggaactcgcgccgatatttccgagatcgccccgctacttgcccgaaacgcagctgacccttgtgagctggtggatcttgaacatgcccttgacctgctgacacacgagtcttcgcatttcctggcggtggttcgaaacgctcgtggcaagataatcgcagcgatgcagttgactattgttccggagttttcccgcggtggtgcgcttcatcttcacatcgaggggccgttcattattccggaatatcgcaccaccgatttggataaaaagctgcgcgcctgggctgtggagcatgggcgtgcgcgaggggtgaaggttgaggaggtggtgggatagttggtttattggcgcctcgt

SEQ ID NO: 618 - protein, 500 aa, Corynebacterium glutamicum
MAISVSMPKAISREELERAWLEVIERHGTLRTVFSTGMGGEVQQHRIDVGPGKWIDHAVAPGESINEALRAVLNRQCSPYSRPSHSLCIIDAHPRPTVIIGSDHSHVDMWSMLVIVRDLLAALDMELPVEPPLAFESHTAELLAAPPAPERIHQRWREILEAGGGKMPQFPLPLGDAISMPERVEVRDIFGVNGLAIYSARARAQQVSSLALTISVMADVTAALADLPLRAVFPVHSRFDQRWHDSVGWFISNSVIEVPDSDPHTAAQAVREAVSLGSYPLAELLEPWGGMPETPGMFAISWLDLRRLPVSIDDIGLQAQYVSASLRTDGVMLWFILDRSGAHLRCRYPDSLVARENVGRWIDAIVAQMRAEAGTVNLQAGGEQLTLRHGTRADISEIAPLLARNAADPCELVDLEHALDLLTHESSHFLAVVRNARGKIIAAMQLTIVPEFSRGGALHLHIEGPFIIPEYRTTDLDKKLRAWAVEHGRARGVKVEEVVG

SEQ ID NO: 619 - DNA, 1623 bp, Corynebacterium glutamicum; identical to SEQ ID NO: 617
  CDS (101)..(1600): FRXA01400

SEQ ID NO: 620 - protein, 500 aa, Corynebacterium glutamicum; identical to SEQ ID NO: 618

SEQ ID NO: 621 - DNA, 845 bp, Corynebacterium glutamicum
  CDS (1)..(822): RXN01409
tgggtggatttccccgacgtcaccgcacgtttggggtatgaatacatgcagctgacccctcatgtagatttcggtcctttcttccgccaccccaaggcagacgatgatctcgtggcagccctgaaaaagcgtgccaaggatgccggagtcaccattcctgcactgttgccagtgcagcgtatttcctggccggaggaaacccagcgtgttgcagcagtacgcaacatcaagcgcatcatccagttggccgttgatctggaagtagacaccctcaacacggagttttctggacgcccagaacgctccgaggattccgaagatgccttctaccgctccatggaagaactcctgccaatcctggaaaaagagggcatcaagttcaacatcgacccacaccctgatgatttcgtggaaaacggtattgaagcatggcgagtcatccgcggtctgaactccaagcaggtgggctttgtttacgtggcacctcactcattccacatgggtgatcaggctgaggcaatcctgccagcagtaggcgatcgccttggggctgtgtacctgtcagataccttcgaccaccacaaatcccacggcctgcgctacatcactaaccctccaggcaacgcagtgcgcgtgcaccagcacctaaaaatcggtgatggcgatgtgaactttgaagagatcttctcactgctgcgctctaccggttaccttgaccgtgaagatgcactgttggtctccaacgtgtttgcagaagatgaagcagcagatgaagtatcccgctaccagctggagaaaatccgctcactcatcgaaaacgcatagagttatctcgaaactaccaa

SEQ ID NO: 622 - protein, 274 aa, Corynebacterium glutamicum
WVDFPDVTARLGYEYMQLTPHVDFGPFFRHPKADDDLVAALKKRAKDAGVTIPALLPVQRISWPEETQRVAAVRNIKRIIQLAVDLEVDTLNTEFSGRPERSEDSEDAFYRSMEELLPILEKEGIKFNIDPHPDDFVENGIEAWRVIRGLNSKQVGFVYVAPHSFHMGDQAEAILPAVGDRLGAVYLSDTFDHHKSHGLRYITNPPGNAVRVHQHLKIGDGDVNFEEIFSLLRSTGYLDREDALLVSNVFAEDEAADEVSRYQLEKIRSLIENA

SEQ ID NO: 623 - DNA, 839 bp, Corynebacterium glutamicum
  CDS (1)..(816): FRXA01409
gatttccccgacgtcaccgcacgtttggggtatgaatacatgcagctgacccctcatgtagatttcggtcctttcttccgccaccccaaggcagacgatgatctcgtggcagccctgaaaaagcgtgccaaggatgccggagtcaccattcctgcactgttgccagtgcagcgtatttcctggccggaggaaacccagcgtgttgcagcagtacgcaacatcaagcgcatcatccagttggccgttgatctggaagtagacaccctcaacacggagttttctggacgcccagaacgctccgaggattccgaagatgccttctaccgctccatggaagaactcctgccaatcctggaaaaagagggcatcaagttcaacatcgacccacaccctgatgatttcgtggaaaacggtattgaagcatggcgagtcatccgcggtctgaactccaagcaggtgggctttgtttacgtggcacctcactcattccacatgggtgatcaggctgaggcaatcctgccagcagtaggcgatcgccttggggctgtgtacctgtcagataccttcgaccaccacaaatcccacggcctgcgctacatcactaaccctccaggcaacgcagtgcgcgtgcaccagcacctaaaaatcggtgatggcgatgtgaactttgaagagatcttctcactgctgcgctctaccggttaccttgaccgtgaagatgcactgttggtctccaacgtgtttgcagaagatgaagcagcagatgaagtatcccgctaccagctggagaaaatccgctcactcatcgaaaacgcatagagttatctcgaaactaccaa

SEQ ID NO: 624 - protein, 272 aa, Corynebacterium glutamicum
DFPDVTARLGYEYMQLTPHVDFGPFFRHPKADDDLVAALKKRAKDAGVTIPALLPVQRISWPEETQRVAAVRNIKRIIQLAVDLEVDTLNTEFSGRPERSEDSEDAFYRSMEELLPILEKEGIKFNIDPHPDDFVENGIEAWRVIRGLNSKQVGFVYVAPHSFHMGDQAEAILPAVGDRLGAVYLSDTFDHHKSHGLRYITNPPGNAVRVHQHLKIGDGDVNFEEIFSLLRSTGYLDREDALLVSNVFAEDEAADEVSRYQLEKIRSLIENA

SEQ ID NO: 625 - DNA, 3075 bp, Corynebacterium glutamicum
  CDS (101)..(3052): RXN01434
ggtttcctgcgcaccgtgatgattggtgcggcgctgtcgccggccatcgcttcggcgttcaacactgccaacacgctgcccaacctgatcactggaaatcgtgttgggtgcggtgctgacatcgctggttattccggtccttacccgcgcggaaaaagaagacgccgacggcggttccgggttcttcaggcggctgctcaccctgtcggtgacgctgctgggtggtgtcaccatcctgtcgattatcggcgcgccgctgctgacacggatgatgctgtcctctgagggacaagtcaacgtggtcatgtccacggcctttgcgtattggctgctgccacagattttcttctacggcctgtttgccctgttcatggctgtgttgaacacccgtgaagtgttcaaacccggcgcgtgggcacctgttgtcaacaatgtgatcaccttgaccgtgctgggcgtgtacatggtgctgcctgcgcgtttgcacccgcatgagcaggtgggcatttttgatccgcagatcattttcctcggcgtgggcaccacccttggtgtggttgcacagtgtctaatcatgattccgtacctgcgtcgcgcgggcattgatatgcgccctctgtggggtatcgatgcgcgtttgaagcaattcggtggcatggcgatggcgatcatcgtgtacgtggcaatctcccagttcggttacatcatcaccactcgcattgcgtcgattgcagacgatgctgcgccgtttatttatcagcagcactggatgttgctgcaagttccttatggcatcatcggcgtcaccttgctcaccgcgattatgccgcgactgtcccgcaacgcggcagacggcgatgatagggcagtagtctctgaccttcagttgggttccaagctaaccttcatcgcactgatccccatcgtggtgttcttcaccgccttcggtgtccctattgccaatggcctttttgcctacggccaattcgatgccaacgccgccaacatccttggttggactctgagcttctctgctttcacgctgattccttacgctttggtgctgctacatctgcgtgtgttttatgcgcgtgaagaggtctggaccccaaccttcatcatcgccggcatcaccgccaccaaggtcgtgctttccctgttggcaccgctgctgtcgagctccccggagcgtgtggtggtgcttcttggtgcggccaacggtttcagtttcatcaccggcgcggtcatcggcgcgtatctgttgcgcaacaaactcggcctgttgggtatgcgctctttggctaaaacctccctgtgggcgttgggctctgcggcggttggtgcagcagcagcatgggcgttggggtggctgattcaagccgtcgtgggcgatttcttgctgggcactctaagctccgtaggctacttgttgaacctggctgtgttgggtgtcttcttcatcttcgtcaccggcatcgtgttgtcacgttctggtttgccggaggtccaaaacttgggccaggcactgacccgcatcccaggtttgagccggtttattcgcccgaataccaagatctctttggatgtcggcgaagtctccgagcaggatttctccacccagctggtcgcgccaagcgagttcgcagcaacccctgtgccgccaccgatgtccgccggtattgtccgcggacctcgcctggttcccggcgccccagtcggcgacggtcgtttccgtctgctcgccgatcacggcggcgtccaaggcgcgcgtttctggcaggcccgcgagatcgccaccggcaaggaagtcgcgctgatctttgtggatacttccggcaacgccccatttgcgccactgtcttcggcagccgcagcgggcatcgcctacgaggtgcagcgccgcaccaagaagctggccagcttgggcagcttggcggtagcccccaacatccactccgaggcgtaccgcaacggttgcctcattgtggccgattgggtgcctggctccagcttgagcgccgtcgcggaatccggtgccgatccccgcgccgccgcgttcgcgctcgcggaactaactgaaaccatcggcgaggcccacgagatgggtatcccggccggcttggacaacaagtgccgaattcgtatcaacaccgacggccatgccgtcctcgccttgccggcgattttgcccgatgcctcagagctccgcgacgccaagtccctggcctcggccgccgagatgcttatcgacgcgaccctcgctcccagcgacgtcaaggcaatggtcactgaagcccaggggctagctacagaagacaatcccgattacgcatcacttgccatggcgatgcgcacctgcggactgttcaccgaggaaccaacccaccttgtggtgaagaaggaaaagacaccaaagcctgcgacacgtgatggtttcggtgcctccgactacaccgtcaagggcatggcagccatcgccgctgtggtgatcatcttggtttccctggtggccgccggtaccgcgttcctcaccagcttcttcggcagcagcaccaacgaacaatccccgttggcctctgttgaagccaccacctctgcaacaccagaacctgtggggccaccggtctacctggatctggatcaagcccgcacgtgggatgacggtgcaggaacagatgtcaccgacgtcaccgacggcaacacctccaccgcatggacctccaccggcggcgacggcctcctagttgacctgtccacgcctgcccgcctcgaccgcgtcatcttgaccaccggcaccggctccgacagcaacgtgacctcgaccgtgaagatctacgcattcaacgacgcctcaccacactccctgtcggaaggcatcgagatcggcaccgtggattattccggccgcagtctcagccacagcatccgcgattcctccaagcttccgggtcaggtggaatccgtggtgattctggtcgatgaggttcgttcctcacaaacctcagacaccaatccacagatgcagatcgctgaagtacaacttgttggttggtaaattacgcgtttgtgattgac

SEQ ID NO: 626 - protein, 984 aa, Corynebacterium glutamicum
VLGAVLTSLVIPVLTRAEKEDADGGSGFFRRLLTLSVTLLGGVTILSIIGAPLLTRMMLSSEGQVNVVMSTAFAYWLLPQIFFYGLFALFMAVLNTREVFKPGAWAPVVNNVITLTVLGVYMVLPARLHPHEQVGIFDPQIIFLGVGTTLGVVAQCLIMIPYLRRAGIDMRPLWGIDARLKQFGGMAMAIIVYVAISQFGYIITTRIASIADDAAPFIYQQHWMLLQVPYGIIGVTLLTAIMPRLSRNAADGDDRAVVSDLQLGSKLTFIALIPIVVFFTAFGVPIANGLFAYGQFDANAANILGWTLSFSAFTLIPYALVLLHLRVFYAREEVWTPTFIIAGITATKVVLSLLAPLLSSSPERVVVLLGAANGFSFITGAVIGAYLLRNKLGLLGMRSLAKTSLWALGSAAVGAAAAWALGWLIQAVVGDFLLGTLSSVGYLLNLAVLGVFFIFVTGIVLSRSGLPEVQNLGQALTRIPGLSRFIRPNTKISLDVGEVSEQDFSTQLVAPSEFAATPVPPPMSAGIVRGPRLVPGAPVGDGRFRLLADHGGVQGARFWQAREIATGKEVALIFVDTSGNAPFAPLSSAAAAGIAYEVQRRTKKLASLGSLAVAPNIHSEAYRNGCLIVADWVPGSSLSAVAESGADPRAAAFALAELTETIGEAHEMGIPAGLDNKCRIRINTDGHAVLALPAILPDASELRDAKSLASAAEMLIDATLAPSDVKAMVTEAQGLATEDNPDYASLAMAMRTCGLFTEEPTHLVVKKEKTPKPATRDGFGASDYTVKGMAAIAAVVIILVSLVAAGTAFLTSFFGSSTNEQSPLASVEATTSATPEPVGPPVYLDLDQARTWDDGAGTDVTDVTDGNTSTAWTSTGGDGLLVDLSTPARLDRVILTTGTGSDSNVTSTVKIYAFNDASPHSLSEGIEIGTVDYSGRSLSHSIRDSSKLPGQVESVVILVDEVRSSQTSDTNPQMQIAEVQLVGW

SEQ ID NO: 627 - DNA, 389 bp, Corynebacterium glutamicum
  CDS (1)..(366): FRXA01434
gtcaccgacggcaacacctccaccgcatggacctccaccggcggcgacggcctcctagttgacctgtccacgcctgcccgcctcgaccgcgtcatcttgaccaccggcaccggctccgacagcaacgtgacctcgaccgtgaagatctacgcattcaacgacgcctcaccacactccctgtcggaaggcatcgagatcggcaccgtggattattccggccgcagtctcagccacagcatccgcgattcctccaagcttccgggtcaggtggaatccgtggtgattctggtcgatgaggttcgttcctcacaaacctcagacaccaatccacagatgcagatcgctgaagtacaacttgttggttggtaaattacgcgtttgtgattgac

SEQ ID NO: 628 - protein, 122 aa, Corynebacterium glutamicum
VTDGNTSTAWTSTGGDGLLVDLSTPARLDRVILTTGTGSDSNVTSTVKIYAFNDASPHSLSEGIEIGTVDYSGRSLSHSIRDSSKLPGQVESVVILVDEVRSSQTSDTNPQMQIAEVQLVGW

SEQ ID NO: 629 - DNA, 1290 bp, Corynebacterium glutamicum
  CDS (101)..(1267): RXN01448
gtaatctcagcagttaaaaagggcagttccgcatcagggggactgccctttttcgtgtcttctcatgctcttgtgaatatgcatagctaatcttgaggccatggcaaagaagaaactggggactgtcgccagactgtctgaactggataagtccctgcgcaatagattgctgcgggttcgttcccgactgctgtttattgttcattccgcaattggtgcgggtgtggcgtattggatcgccgtggaagtgatcaaacacggacaaccgtttttcgcaccgatgtccgcggtgattattttgggtctctccggaggagaccgcatcaaaagagccacggaactcaccctgggctgtgctttaggcgttggtttgggtgatttactgatcatgcaaatcggcacgggctattggcagatatttgtggtagttggattagcgctgctggtggcctcgtttgtttcaccggcaccgttggtgagtaatcagatggccattggtggcattttgattgccacgatgttcccgccaggtgatggtggaagcattgaccgtatgatcgacgccttcattggtggtggcgtgggaattttggtcatcgcacttcttccctcatctcctcttgacgcaggccggcatcaagtggccaacgttttggggatcgcagctagtgtgctggaagacgtggcagcttccctaaaagccaaggatgcagccaaactcaacaatgctttggaagcattgagaaggtcgcaggcgtcggtgaacaagctggaaactgcggcatcttcaggcaaggaagcaaccaccgtatcgccatttttatggggagatagggcccgcgtgagatcgctgtatcgcattctggcgccagtggacaacgtcatccgaaatgctcgagtccttgcgcgacgggcagtggtgctgaccgaagacaatgacaccgtcagtgatgaacaaatccacgtgattgaggaaatcgcagacattgcactgcgactgtcagacctttatgagcaccacaaagaaatcagtgaagcactggaaattcctgagttggttaaccgactgcgtcaactgggcagtgaagtgggcgaggacatcgccgaagatcgagtgctatccgcacaagtaattttggcgcaatcgcgatccatcattgtggacctgttgcagatctgcggcatgtccagggaatctgcggtggcagtgttggttccgacctcagagagtccggcttaccctccggagctgtgggatgacgaagactagccttttatcgcggttcggtt

SEQ ID NO: 630 - protein, 389 aa, Corynebacterium glutamicum
MAKKKLGTVARLSELDKSLRNRLLRVRSRLLFIVHSAIGAGVAYWIAVEVIKHGQPFFAPMSAVIILGLSGGDRIKRATELTLGCALGVGLGDLLIMQIGTGYWQIFVVVGLALLVASFVSPAPLVSNQMAIGGILIATMFPPGDGGSIDRMIDAFIGGGVGILVIALLPSSPLDAGRHQVANVLGIAASVLEDVAASLKAKDAAKLNNALEALRRSQASVNKLETAASSGKEATTVSPFLWGDRARVRSLYRILAPVDNVIRNARVLARRAVVLTEDNDTVSDEQIHVIEEIADIALRLSDLYEHHKEISEALEIPELVNRLRQLGSEVGEDIAEDRVLSAQVILAQSRSIIVDLLQICGMSRESAVAVLVPTSESPAYPPELWDDED

SEQ ID NO: 631 - DNA, 842 bp, Corynebacterium glutamicum
  CDS (40)..(819): FRXA01448
gcctcgtttgtttcaccggcaccgttggtgagtaatcagatggccattggtggcattttgattgccacgatgttcccgccaggtgatggtggaagcattgaccgtatgatcgacgccttcattggtggtggcgtgggaattttggtcatcgcacttcttccctcatctcctcttgacgcaggccggcatcaagtggccaacgttttggggatcgcagctagtgtgctggaagacgtggcagcttccctaaaagccaaggatgcagccaaactcaacaatgctttggaagcattgagaaggtcgcaggcgtcggtgaacaagctggaaactgcggcatcttcaggcaaggaagcaaccaccgtatcgccatttttatggggagatagggcccgcgtgagatcgctgtatcgcattctggcgccagtggacaacgtcatccgaaatgctcgagtccttgcgcgacgggcagtggtgctgaccgaagacaatgacaccgtcagtgatgaacaaatccacgtgattgaggaaatcgcagacattgcactgcgactgtcagacctttatgagcaccacaaagaaatcagtgaagcactggaaattcctgagttggttaaccgactgcgtcaactgggcagtgaagtgggcgaggacatcgccgaagatcgagtgctatccgcacaagtaattttggcgcaatcgcgatccatcattgtggacctgttgcagatctgcggcatgtccagggaatctgcggtggcagtgttggttccgacctcagagagtccggcttaccctccggagctgtgggatgacgaagactagccttttatcgcggttcggtt

SEQ ID NO: 632 - protein, 260 aa, Corynebacterium glutamicum
MAIGGILIATMFPPGDGGSIDRMIDAFIGGGVGILVIALLPSSPLDAGRHQVANVLGIAASVLEDVAASLKAKDAAKLNNALEALRRSQASVNKLETAASSGKEATTVSPFLWGDRARVRSLYRILAPVDNVIRNARVLARRAVVLTEDNDTVSDEQIHVIEEIADIALRLSDLYEHHKEISEALEIPELVNRLRQLGSEVGEDIAEDRVLSAQVILAQSRSIIVDLLQICGMSRESAVAVLVPTSESPAYPPELWDDED

SEQ ID NO: 633 - DNA, 933 bp, Corynebacterium glutamicum
  CDS (101)..(910): RXN01459
gattcggcgattcacgaatatccaccctacaacctgtgttcgcttacagcgttgttcggatcgtagcaataggaaatagttgccttgtagattggtaaatatgaactctaatggctttggtttctcttttggcaacaacgatgacgacgatgacaaaaaccgcaacaacgacccattcggccttttcggtggcaacttcggattcggaggacaaggtggcgctggtggccccggcggattaggcgatattttaaaccagttcggccagatgctgtccggaatgggagattcgatgaactcccccgaagcagcaggcccggttaattatgatttagcagcacgcatcgcccgccagcagattggtcgcgtagcgccggtgaaggattctgagaaggaagcagtcgaagagtcccttcgccttgctgaactctggctcgataacgccacccagctccccacttccgggcaccgcgtcgaagcgtggaatccagaaaactggttagaaaacaccctgcctgtgtggaagcgtcttgtctcccctgttgcggagcaaatgaacaaagcccaattagaaaacctccctgaagaagcccgcgagatgatgggcccgatgtcttctttgatgaactccatgtcttcgatgaacttcggagttcaattaggaaatgcgctgggcgacctcgcaaagcagaccctcaccggctctgacttcggtttgcctatctccccagtcggcgtatctgccgtcctgcccggcaacatcgccgaagcatccaaaggcctcaacgtggcaccgcaagaaatgctcgtttacatctgtgcccgcgaagccgccgccaacgcctcttcaagcacgtgccgtggcttgtcgagcgcctcgtttcctccgttgaggaatacgccgtcggcctagaaatcgacacctcacacatt

SEQ ID NO: 634 - protein, 270 aa, Corynebacterium glutamicum
MNSNGFGFSFGNNDDDDDKNRNNDPFGLFGGNFGFGGQGGAGGPGGLGDILNQFGQMLSGMGDSMNSPEAAGPVNYDLAARIARQQIGRVAPVKDSEKEAVEESLRLAELWLDNATQLPTSGHRVEAWNPENWLENTLPVWKRLVSPVAEQMNKAQLENLPEEAREMMGPMSSLMNSMSSMNFGVQLGNALGDLAKQTLTGSDFGLPISPVGVSAVLPGNIAEASKGLNVAPQEMLVYICAREAAANASSSTCRGLSSASFPPLRNTPSA

SEQ ID NO: 635 - DNA, 933 bp, Corynebacterium glutamicum; identical to SEQ ID NO: 633
  CDS (101)..(910): FRXA01459

SEQ ID NO: 636 - protein, 270 aa, Corynebacterium glutamicum; identical to SEQ ID NO: 634

SEQ ID NO: 637 - DNA, 417 bp, Corynebacterium glutamicum
  CDS (101)..(394): RXN01460
gcaacatcgccgaagcatccaaaggcctcaacgtggcaccgcaagaaatgctcgtttacatctgtgcccgcgaagccgccgccaacgcctcttcaagcacgtgccgtggcttgtcgagcgcctcgtttcctccgttgaggaatacgccgtcggcctagaaatcgacacctcacacattcaagaggccatgggcaacttccaaatggacaacccagatcctgaacgcctccaggaaatgatgaacgaactccaaggtatggacctgtccccacgcatcggatcccgcaacgccaacgcagtatcccgcctggaaactctcctcgcactcgtcgaaggctgggtcgacatcgtagttacccaagccctgagcgaacgcattccatcaccgacgccatgaacgaagcctggaagcgccgc

SEQ ID NO: 638 - protein, 98 aa, Corynebacterium glutamicum
VPWLVERLVSSVEEYAVGLEIDTSHIQEAMGNFQMDNPDPERLQEMMNELQGMDLSPRIGSRNANAVSRLETLLALVEGWVDIVVTQALSERIPSPTP

SEQ ID NO: 639 - DNA, 417 bp, Corynebacterium glutamicum; identical to SEQ ID NO: 637
  CDS (101)..(394): FRXA01460

SEQ ID NO: 640 - protein, 98 aa, Corynebacterium glutamicum; identical to SEQ ID NO: 638

SEQ ID NO: 641 - DNA, 930 bp, Corynebacterium glutamicum
  CDS (101)..(907): RXN01471
cctccaaccagagctataaaaaaggttgtagaagaaatttcttaacatacatcgttgtgttgccaggggtttaacagattagttgctaaggtctgtctccatgcagagttttaagacgcttgaatcttggcctgtcgacaatgtttcggccagtgtcatctccgacggcgccgtgcacttttacggcgacgtcgatcgtgtttttgaactcatgagtgtgacaaaactcctggccacctacggtttccttgttgccatcgaagaaggtgtttttgagctcgattcaccgatgggtcctgaaggatccacagtgaggcatctgctctcacatgcttccggcgtggcattcgataagccggtagcggaaaagggagtgggggagcgccgcatttactcctctgctggcatggacatcttggcggatgctgttgccgctgaagctgaaatgccgtttgcagagtatctccgcgaggctgtgttcgagcctttgggaatggagaactctgaactatggggttctgcgggccacgaggcgcgcagcacagtggctgatctgaccaagttcggccaagagctcaccgcaccaactctgatctcaccagaaacccttgcagaggctttccaggtgcaattcccggaactgattggcaccgtccccggttatggcatgcagaagccgtgtccgtggggattgggctttgaaattaagggacagaagtcgccgcactggacaggtgacttgatgccggagaacactgctggacactttggacagtcgggaacattcttttggactgttccaggctcaggtcaagtcggggttgttttgactgaccgaaatttcggtccttgggctaaaccgttgtggactgccttcaatgacgaagtctgggccgagttaaattcataaacttttgccgtaattacggt

SEQ ID NO: 642 - protein, 269 aa, Corynebacterium glutamicum
MQSFKTLESWPVDNVSASVISDGAVHFYGDVDRVFELMSVTKLLATYGFLVAIEEGVFELDSPMGPEGSTVRHLLSHASGVAFDKPVAEKGVGERRIYSSAGMDILADAVAAEAEMPFAEYLREAVFEPLGMENSELWGSAGHEARSTVADLTKFGQELTAPTLISPETLAEAFQVQFPELIGTVPGYGMQKPCPWGLGFEIKGQKSPHWTGDLMPENTAGHFGQSGTFFWTVPGSGQVGVVLTDRNFGPWAKPLWTAFNDEVWAELNS

SEQ ID NO: 643 - DNA, 930 bp, Corynebacterium glutamicum; identical to SEQ ID NO: 641
  CDS (101)..(907): FRXA01471

SEQ ID NO: 644 - protein, 269 aa, Corynebacterium glutamicum; identical to SEQ ID NO: 642

SEQ ID NO: 645 - DNA, 363 bp, Corynebacterium glutamicum
  CDS (101)..(340): RXN01479
agcgctgcccgtgccataaatttcgaagaagcgcgaaacaggtagagtctaaggtgtcattcttggtacaagttttatatttagggagagttatccacacatgatccagttagtgataggcgctgcagcaggctacgtgcttggcacaaaggccggccgcaagcgttaccaccagatcaaaaagggatatgaggcagcgattaactcccctgccaccaaatctgcagtaaacgccgcccgcaaagccattgccaacaagctggatccgcagccccgcatgaaggaagtaaaaaacctgcggactgcggacgggcatgaagtcctcgagcaagaccaggactaaattaccctctaaacgcccgg

SEQ ID NO: 646 - protein, 80 aa, Corynebacterium glutamicum
MIQLVIGAAAGYVLGTKAGRKRYHQIKKGYEAAINSPATKSAVNAARKAIANKLDPQPRMKEVKNLRTADGHEVLEQDQD

SEQ ID NO: 647 - DNA, 351 bp, Corynebacterium glutamicum
  CDS (101)..(328): FRXA01479
gccataaatttcgaagaagcgcgaaacaggtagagtctaaggtgtcattcttggtacaagttttatatttagggagagttatccacacatgatccagttagtgataggcgctgcagcaggctacgtgcttggcacaaaggccggccgcaagcgttaccaccagatcaaaaagggatatgaggcagcgattaactcccctgccaccaaatctgcagtaaacgccgcccgcaaagccattgccaacaagctggatccgcagccccgcatgaaggaagtaaaaaacctgcggactgcggacgggcatgaagtcctcgagcaagaccaggactaaattaccctctaaacgcccgg

SEQ ID NO: 648 - protein, 76 aa, Corynebacterium glutamicum
VIGAAAGYVLGTKAGRKRYHQIKKGYEAAINSPATKSAVNAARKAIANKLDPQPRMKEVKNLRTADGHEVLEQDQD

SEQ ID NO: 649 - DNA, 669 bp, Corynebacterium glutamicum
  CDS (101)..(646): RXN01484
gagtttactcttaaccgcagtagtgcagccagccctgagggtggtggcgtattcgatgctcagaacgcctaataatcggcacaaaattgattcaattttggtgttgggcacagctcaatatgatggagttccatcgaggcagtttgctgctcgtttgaggcatgccgcgaagctgtggcgtcttcatgaaatccagcatgtatatactgtcggcggaaaacttcctggcgatcgtttcaccgaagcagaagtcgcgcgggagtatttgatcaaagagggcgtggatccggatctgatttttgtctctgcagttggcaatgacactgtctcctcctatgaggcgcttgatccggaaaagcttggtcgggtgctgattgttactgatccgaaccattcgtatcgggcggtgcgcatcgcgcgacgcatgggctttgacgcgaaaccttccccgacaacctatagtcccgcgaagtttccgtcgatagtttattttctgaccttgtcccatgagtggggcggggtagtagtacaggacgtgtcgcggctcttgggtgaacgggtgcccgataaggtgaagcatctttgcgcgcaatccaaggtctgctgcgcccttcgcggcgtgcacgccatgagcaacttcggaggctgaaaaagtagatgtacccctat

SEQ ID NO: 650 - protein, 182 aa, Corynebacterium glutamicum
VLGTAQYDGVPSRQFAARLRHAAKLWRLHEIQHVYTVGGKLPGDRFTEAEVAREYLIKEGVDPDLIFVSAVGNDTVSSYEALDPEKLGRVLIVTDPNHSYRAVRIARRMGFDAKPSPTTYSPAKFPSIVYFLTLSHEWGGVVVQDVSRLLGERVPDKVKHLCAQSKVCCALRGVHAMSNFGG

SEQ ID NO: 651 - DNA, 669 bp, Corynebacterium glutamicum; identical to SEQ ID NO: 649
  CDS (101)..(646): FRXA01484

SEQ ID NO: 652 - protein, 182 aa, Corynebacterium glutamicum; identical to SEQ ID NO: 650

SEQ ID NO: 653 - DNA, 2175 bp, Corynebacterium glutamicum
  CDS (101)..(2152): RXN01485
ctcagggctggctgcactactgcggttaagagtaaactcttggctaaaaatcttctcacgttaactagtgtgccagctggactcgtctaaggtggggaccatgaactttagtttggtgcatcttcgggaaaacgtccgccgtgtatcggtcactgtggcaattggagctggcgcgctccttatcagtggaccattttttactgctcacactgcagaagccacagaaacatatgtcttggctgaatcaccagaattttaccaagacaatgtcactgactacaccggccagatttcctcgtccgatatcaccaacattcaggctgccatcgatgatgtaaaggcatctgaacaaaaggttattttcgttgttttcctaagctctttcgacggagttgaccctgaaacgtggacgcagcaagcactccaagccaacggcggcggaaacgtcttgatttatgcactcgctcccgaggaacggcagtacggcatccaaggtggtactcaatggaccgacgctgaactcgacgccgccaacaacgctgctttccaggcactttcccaagaagattgggcaggctctgcactagcgctggcagaatcagttggttctagttcttccagctcttcgggctcgtccagctcttccgatttttccggcgcttggttggctgctgcgggcgttggcacagtggccgctggtggcggaatttgggcctattcccgcagccgcaagaagaaaacaagtgctgcaaccttggaagatgcacgcgaaatcgacccgcgcgataccaaccgcctcatgcagcttcccatggaaactctcgaacaccttgcccaagaagagctcacctccactgatgactccatccgtcgcggaaaagaagagctcgctatcgctacctccgagttcggaccagagcgcacccgcagcttcaaccgcgccatgaaccactccaccggcaccctgcaaaaagcctttgagattcagcagcgcctcaacgattctatcccagaatccgaagccgaacgtcaatccatgctggtagaaatcatttcatcctgtggccaagccgacgatgccctcgacgccgaagcccaaaactttgccgatatgcgcaacctgctgatcaacgcgggcagcaaattggatgctctcacccaaaaatccgtcgacctgcgcacccgcctccccaaggcccaagaaacactcgctggcctgcgcactcgctactcagcagaggtccttgaaagcatcgacgacaacgtcgacctcgccagcgcttcgctcgacgaagcagaagaagtcctgccacaggcgtacgagatagagtccatgcccgcaggcgagcagggcgggcttatcgacgcgatccgtcacatcgagcacgccatcactaccgcagacaaactcctcgcgggcgtcgagcatgccgatgaaaacatctccacagccaaagcaaacgttgccgatctgatccaagaaatctcagacgaaatcaacgaagccggccaactcaaacaaagcgcaggagccgacggtgcccgtgccgactgggcctccctcgacgatgctgtccgcgcagccagcgcagcactaatcaccgcatcagcagacgccgaaaaggatccgctcggaacctacacagaacttgtcgatgtcgactccgccctcgacactcaacttgacacacttcgcgccaccgcagctgatcaagcccgccagctacgcgtattcgaccaacagctgcaatctgcaagaagccaaatccaaaaggccgaagacctcatctccacccgcggtcgcatcgtaaaatccgaagcccgcacccacctggccaacgcacaaaagctgtacgccatggcacaacaaaaccgcacccgcgacacccgtgcaggaattgattacggacgtcaagcagcagtcgcagcccaacgcgccagcaagtcagcacaaaacgacatcaccacctacaacaatcgccacaattccggtggcggaaccaccggtgcgattgtcaccggcatggtgatcaactcgattctcaacagcggccgcggtggcggtttctgtggaggcggaggctttggtggaggcggtggcggcttcagcggtggtggcggtggcggaggagggttccgcggaggccgcttctagcctgaaacgagcaaaaccaa

SEQ ID NO: 654 - protein, 684 aa, Corynebacterium glutamicum
MNFSLVHLRENVRRVSVTVAIGAGALLISGPFFTAHTAEATETYVLAESPEFYQDNVTDYTGQISSSDITNIQAAIDDVKASEQKVIFVVFLSSFDGVDPETWTQQALQANGGGNVLIYALAPEERQYGIQGGTQWTDAELDAANNAAFQALSQEDWAGSALALAESVGSSSSSSSGSSSSSDFSGAWLAAAGVGTVAAGGGIWAYSRSRKKKTSAATLEDAREIDPRDTNRLMQLPMETLEHLAQEELTSTDDSIRRGKEELAIATSEFGPERTRSFNRAMNHSTGTLQKAFEIQQRLNDSIPESEAERQSMLVEIISSCGQADDALDAEAQNFADMRNLLINAGSKLDALTQKSVDLRTRLPKAQETLAGLRTRYSAEVLESIDDNVDLASASLDEAEEVLPQAYEIESMPAGEQGGLIDAIRHIEHAITTADKLLAGVEHADENISTAKANVADLIQEISDEINEAGQLKQSAGADGARADWASLDDAVRAASAALITASADAEKDPLGTYTELVDVDSALDTQLDTLRATAADQARQLRVFDQQLQSARSQIQKAEDLISTRGRIVKSEARTHLANAQKLYAMAQQNRTRDTRAGIDYGRQAAVAAQRASKSAQNDITTYNNRHNSGGGTTGAIVTGMVINSILNSGRGGGFCGGGGFGGGGGGFSGGGGGGGGFRGGRF

SEQ ID NO: 655 - DNA, 2175 bp, Corynebacterium glutamicum; identical to SEQ ID NO: 653
  CDS (101)..(2152): FRXA01485

SEQ ID NO: 656 - protein, 684 aa, Corynebacterium glutamicum; identical to SEQ ID NO: 654

SEQ ID NO: 657 - DNA, 927 bp, Corynebacterium glutamicum
  CDS (101)..(904): RXN01492
tgaagtgggcgcgttagcttcggcgcgtggcaaaccacatttgctggactgcaggcataatggacaaagacttttagcaacaactatgtggaggtgacaggtgaccacaactctgtgggcggtttctgacctccatgcagcggtgaaagctaacgctgatccaattgagaatattcagcctaaggatccgtctgactggttgattgttgcaggtgacgtggcggaacgtaccgaattggtgctggaaattttggcacgtttgcgcaggcgctttgccaaggtgatctgggttccgggtaaccatgagttgttttctcgctccgcggaccgctatcaggggcgcgataagtactctgaactcgttgaaggctgccgcaagattgatgtgttgactccggaggacccttacttaacctttggtggggttactatcgttccgttgtttacactctatgactactcgttccgtcgacctggtttcaccgtggagcaggctgtgcaagcggcgcgggatcgtcaagtgatgatgactgatgagttttctattgcgccttttgttgatatccgagcgtggtgctgggatcgcttagcctattccattaagcgtttgagcaagatcaacgggccaacaattttgattaaccactggccgctggtggtggaaccgacttatcagatgcgctggcaggaacttgcattgtggtgcggtactcgccacaccaggggatgggccgaacgctacaacgcggaagccgttatttacggtcatctgcatatgcccggaataaccaacgtcaacggtgtgaaacacattgaagtgtcgttgggttatccgcgcgaatgggagcattggtctgggcagcatgtgtggccatatccagtgatggaggtggacaatgctggatgagtctttgtttccaaattcgg

SEQ ID NO: 658 - protein, 268 aa, Corynebacterium glutamicum
VTTTLWAVSDLHAAVKANADPIENIQPKDPSDWLIVAGDVAERTELVLEILARLRRRFAKVIWVPGNHELFSRSADRYQGRDKYSELVEGCRKIDVLTPEDPYLTFGGVTIVPLFTLYDYSFRRPGFTVEQAVQAARDRQVMMTDEFSIAPFVDIRAWCWDRLAYSIKRLSKINGPTILINHWPLVVEPTYQMRWQELALWCGTRHTRGWAERYNAEAVIYGHLHMPGITNVNGVKHIEVSLGYPREWEHWSGQHVWPYPVMEVDNAG

SEQ ID NO: 659 - DNA, 927 bp, Corynebacterium glutamicum; identical to SEQ ID NO: 657
  CDS (101)..(904): FRXA01492

SEQ ID NO: 660 - protein, 268 aa, Corynebacterium glutamicum; identical to SEQ ID NO: 658

SEQ ID NO: 661 - DNA, 597 bp, Corynebacterium glutamicum
  CDS (101)..(574): RXN01518
agcagaacctgatgccgtcctgcacggcacgaccattgcagaacatgtggataatcttgatcccacagacattgaaggtgtcaccaagatttaaggagtcgtggctttcatgcagaaaacgtcagcgggttggttgatcgcaacgggaggtttcctcgccgctgtgtccgccattttgacgtggcgtttttatggatccatgacctctatttccatcacggtatccatcactttttggttgttggccgtggtgtgtggtttcgcaggtgtgaaggtccaaggtcgcctcgatgaggggctgatcggccaggacaaatcccaaatgaaccccgtgaccattgcctatctggccatgctgggtcgagcgtgtgcgtggggtggcgcaattttcggcggcgtttatgtgggaattggcagttatgtaatcccacgcgccggtgagttgtccgcagcatcgaatgatcttccgggagttattgcctgtgcgctgggcggaatcgcactctcagctgccggactttatttagagcgaagctgtgaggctccgcctccccaatctggcgaagcgatcagctagattggaattcatgaatcaag

SEQ ID NO: 662 - protein, 158 aa, Corynebacterium glutamicum
VAFMQKTSAGWLIATGGFLAAVSAILTWRFYGSMTSISITVSITFWLLAVVCGFAGVKVQGRLDEGLIGQDKSQMNPVTIAYLAMLGRACAWGGAIFGGVYVGIGSYVIPRAGELSAASNDLPGVIACALGGIALSAAGLYLERSCEAPPPQSGEAIS

SEQ ID NO: 663 - DNA, 597 bp, Corynebacterium glutamicum; identical to SEQ ID NO: 661
  CDS (101)..(574): FRXA01518

SEQ ID NO: 664 - protein, 158 aa, Corynebacterium glutamicum; identical to SEQ ID NO: 662

SEQ ID NO: 665 - DNA, 1727 bp, Corynebacterium glutamicum
  CDS (46)..(1704): RXN01549
tgaattccgtttctagattttttttattgattgtgagagtgcattgtggctaatgattttatagaaccaaatgatgcccccgatgcacctgataatggtgactcgggaagctcggggtttgttgatgaagcaaaagataagacccgctcagctgcacaaggcttaggttatggcgcactacgtgtaggttttggtactgcagcacttgcagccaatggtgctcgctctatgggtaatttggctaaaaacctgtggacacgaatgatggggcttgccctgtctgccggtactggtatctctgctgccacaggtggcatgatcactgcacgtgtaggcgcaatgctggcaggtacaggctcggtgttgtcgtcggtgacgactattgcgttgattgtgtcgatgattgtggtgccggcaggtcgaaaagacggcattatcgagttgtgtgagccgccagtaacggccaacccgtttaccattgacgcaggtgatatgactgagaacgcgaagttggtgtacggtgcgctgtcgtatcttgggatgaatgatcaaaatatcgccggtgtcttgggcaactttgagacagaatcaggtatcgacccgactgcggtggagggtatttttgatgaaccaaataccatcggtcctcggaagagagctgcgtgggataagaactttgaacctcagccgatgggtattgggcttgggcagtggacagcagggcgcacacagatgttgctagattttgccgccgatagaaaccgagactggcattacatcgacgtgcagcttgcatttgctattagtggcgataatgaaagcgatcgcaaggtttttctggaaatggttgataataaaaactccagtagcaatagccccaccgcagcgtccgagtacttcctgcgtgagtgggagcgcccggcagatgtcgcaggtaatgcacccattcgtgcagagcaagcatctaagtggtacgcgcagatgggtggttggcaaaagaactcaaccttgggtgagtctgtgatcgctatggctgatggtgcagcagcaaaatccacggcgcgtgatgagcaggatgctcttaatgattgtcctgaagaggaccgcacctcaggtggaaatacgtccgctgcagaagcaatggtgactatttcacatccttatctggctgattctcgtggcaatgacggtactgatatttaccgctatatccatgatgaagtgctcaccggtgatccgtattacgcatcctgtgaccgtggcgttgctaccgctattcgctggtcgggcacggatgatacgttcccagcaggtccaacagcagcacagtatgaatacgttgtgggcacaggatcgggccgttgggaggaaatcggcaatcttgccaccatgtcagagaacgatttgttacctggcgatgtgcttcttggtgcaccgaatcacgttgcgatgtatgtcagcaatgaggttgttgtggacatgttgggccctggtaatgcagagcctaatgcagctattggtcatgcatcgttgaatgaccgctcacctggtctggataccttgagtctggatggatggggcgtgaacttcaaggtgttccgcaacacccaggctgagacaaactcagtgttctctggtgtacagattccggctggtaaagaaattggcgaaatgactaacccaactcgaactactcctgcaggataagtttttttcatcgctgggtt

SEQ ID NO: 666 - protein, 553 aa, Corynebacterium glutamicum
VANDFIEPNDAPDAPDNGDSGSSGFVDEAKDKTRSAAQGLGYGALRVGFGTAALAANGARSMGNLAKNLWTRMMGLALSAGTGISAATGGMITARVGAMLAGTGSVLSSVTTIALIVSMIVVPAGRKDGIIELCEPPVTANPFTIDAGDMTENAKLVYGALSYLGMNDQNIAGVLGNFETESGIDPTAVEGIFDEPNTIGPRKRAAWDKNFEPQPMGIGLGQWTAGRTQMLLDFAADRNRDWHYIDVQLAFAISGDNESDRKVFLEMVDNKNSSSNSPTAASEYFLREWERPADVAGNAPIRAEQASKWYAQMGGWQKNSTLGESVIAMADGAAAKSTARDEQDALNDCPEEDRTSGGNTSAAEAMVTISHPYLADSRGNDGTDIYRYIHDEVLTGDPYYASCDRGVATAIRWSGTDDTFPAGPTAAQYEYVVGTGSGRWEEIGNLATMSENDLLPGDVLLGAPNHVAMYVSNEVVVDMLGPGNAEPNAAIGHASLNDRSPGLDTLSLDGWGVNFKVFRNTQAETNSVFSGVQIPAGKEIGEMTNPTRTTPAG

SEQ ID NO: 667 - DNA, 942 bp, Corynebacterium glutamicum
  CDS (59)..(919): FRXA01549
cagcttgcatttgctattagtggcgataatgaaagcgatcgcaaggtttttctggaaaatggttgataataaaaactccagtagcaatagccccaccgcagcgtccgagtacttcctgcgtgagtgggagcgcccggcagatgtcgcaggtaatgcacccattcgtgcagagcaagcatctaagtggtacgcgcagatgggtggttggcaaaagaactcaaccttgggtgagtctgtgatcgctatggctgatggtgcagcagcaaaatccacggcgcgtgatgagcaggatgctcttaatgattgtcctgaagaggaccgcacctcaggtggaaatacgtccgctgcagaagcaatggtgactatttcacatccttatctggctgattctcgtggcaatgacggtactgatatttaccgctatatccatgatgaagtgctcaccggtgatccgtattacgcatcctgtgaccgtggcgttgctaccgctattcgctggtcgggcacggatgatacgttcccagcaggtccaacagcagcacagtatgaatacgttgtgggcacaggatcgggccgttgggaggaaatcggcaatcttgccaccatgtcagagaacgatttgttacctggcgatgtgcttcttggtgcaccgaatcacgttgcgatgtatgtcagcaatgaggttgttgtggacatgttgggccctggtaatgcagagcctaatgcagctattggtcatgcatcgttgaatgaccgctcacctggtctggataccttgagtctggatggatggggcgtgaacttcaaggtgttccgcaacacccaggctgagacaaactcagtgttctctggtgtacagattccggctggtaaagaaattggcgaaatgactaacccaactcgaactactcctgcaggataagtttttttcatcgctgggtt

SEQ ID NO: 668 - protein, 287 aa, Corynebacterium glutamicum
MVDNKNSSSNSPTAASEYFLREWERPADVAGNAPIRAEQASKWYAQMGGWQKNSTLGESVIAMADGAAAKSTARDEQDALNDCPEEDRTSGGNTSAAEAMVTISHPYLADSRGNDGTDIYRYIHDEVLTGDPYYASCDRGVATAIRWSGTDDTFPAGPTAAQYEYVVGTGSGRWEEIGNLATMSENDLLPGDVLLGAPNHVAMYVSNEVVVDMLGPGNAEPNAAIGHASLNDRSPGLDTLSLDGWGVNFKVFRNTQAETNSVFSGVQIPAGKEIGEMTNPTRTTPAG

SEQ ID NO: 669 - DNA, 363 bp, Corynebacterium glutamicum
  CDS (46)..(363): FRXA02011
tgaattccgtttctagattttttttattgattgtgagagtgcattgtggctaatgattttatagaaccaaatgatgcccccgatgcacctgataatggtgactcgggaagctcggggtttgttgatgaagcaaaagataagacccgctcagctgcacaaggcttaggttatggcgcactacgtgtaggttttggtactgcagcacttgcagccaatggtgctcgctctatgggtaatttggctaaaaacctgtggacaccaatgatggggcttgccctgtctgccggtactggtatctctgctgccacaggtggcatgatcactgcacgtgtaggcgcaatgctggcaggtacaggctcggcg

SEQ ID NO: 670 - protein, 106 aa, Corynebacterium glutamicum
VANDFIEPNDAPDAPDNGDSGSSGFVDEAKDKTRSAAQGLGYGALRVGFGTAALAANGARSMGNLAKNLWTPMMGLALSAGTGISAATGGMITARVGAMLAGTGSA

SEQ ID NO: 671 - DNA, 939 bp, Corynebacterium glutamicum
  CDS (101)..(916): RXN01557
taaaggtgtgaaaatagttcctcacgtggggaactatactgatccttgatgcgttaacttgattgacgacgaaaaatcaattgaaaggatcggggactccgtgcgaagcagcaatcccgtttttagttcccttaaggaaactcaacgtccacaaggccagaacccatacggtggttacgacaacttcggtggtgtctaccagcaaaacgtagctccacagaaggcggagcgcccaatgactgtggatgatgtgatcaccaagactggtatcactctcgcggttattatcgtttttgcattggtcacctttggcgtgtggttggttagccccggcctcggaatgatcttgacccttgttggtgccatcggtggtttcatcaccgttctggtcagcaccttcggcaagaagtacggatctgcggcagtcactttgatttacgcagtattcgaaggcctcttcgtcggcggaatttcccttctgctgtccggcttcacagttggtaacgccaacgcaggtggcctcattggccaggcagtccttggcaccatcggtgtattcattggcatgctgtttgtatacaagactggcgctatcaaggtcactcctaagttcaaccgcatcctcaccggcatgatggttggcgtcctggttcttgtcctgggcaacgttgtatgggcactgttcactggtggcgcaagcccactgcgtgacggtggaatcatcgcgattatcttctccctcttctgcatcggcctggcagcattcagcttcctctccgacttcgatgcagctgaccgcctcgtccgcgaaggtgcaccttccaagatggcatggggcgttgcgcttggtcttgcagtgaccttggtctggctctacaccgaaatcctacgtctgcttagctacttccaaaaccgctagtttacgcagcacaagacccc

SEQ ID NO: 672 - protein, 272 aa, Corynebacterium glutamicum
VRSSNPVFSSLKETQRPQGQNPYGGYDNFGGVYQQNVAPQKAERPMTVDDVITKTGITLAVIIVFALVTFGVWLVSPGLGMILTLVGAIGGFITVLVSTFGKKYGSAAVTLIYAVFEGLFVGGISLLLSGFTVGNANAGGLIGQAVLGTIGVFIGMLFVYKTGAIKVTPKFNRILTGMMVGVLVLVLGNVVWALFTGGASPLRDGGIIAIIFSLFCIGLAAFSFLSDFDAADRLVREGAPSKMAWGVALGLAVTLVWLYTEILRLLSYFQNR

SEQ ID NO: 673 - DNA, 939 bp, Corynebacterium glutamicum; identical to SEQ ID NO: 671
  CDS (101)..(916): FRXA01557

SEQ ID NO: 674 - protein, 272 aa, Corynebacterium glutamicum; identical to SEQ ID NO: 672

SEQ ID NO: 675 - DNA, 1158 bp, Corynebacterium glutamicum
  CDS (101)..(1135): RXN01574
aaaaatccgcacaccccacattgctcaaaggaattgacaaggcgcttcgcaaggccgagtaaggtgggcaacgagtcggtgagagtatgaggaatatttgatgagcaacaaacgcatcggtgtagtgatcgtttcctacggacacgaacaagatgttgccaacctggtagacacatttgcagatcagctgaaaactggtgaccgcgtagttgtcgtggacaaccgcaaaccttgggtgttaaaagacgccgtgggggagcgcctggaaaaacacggcgcagagatcatcaaccacgacaacggtggtttcgccgctggctgcaacgtgggcgcagcgcacatcgtggatgacgttgacctgctgttcttcctcaaccccgacacagtgatcgacgatcccaccctgttcaattcgctgagacgcgtcgatgaacagtgggcagcattcatgccgtacctgctgcttcctgacagcaccattaactccgcaggcaacgccctgcatatttccggactgtcgtgggtgactggtctggatgaaaaaccagttgaaggctcatctgaagttaccgatatttccattgcctctggcgcctgccttgccgtgcgcgtggactggtggaaacgcctcggtggcatggaagaactgtatttcatgtaccacgaagacactgacttctccgcccgcttgctgctggccggcggtcgaattggtctcctgcattccgcgtatgtcacccaccattacgactacgccaagggtgactacaagtggatttacatcgaacgaaaccgacacgttttgctgctcagcgtgctgccgcttccattgctgttcgtgctgatcccgcagatcctcggtgtgaacctgggactgtgggcgattgccgcaaaggaaaagagggtcggactcaaggtgaagtcccttcgcctcctgatccgcgatctaccagcgattttcaaactgcgtaggagcacgcaggagcttgccgaactcacaccatcgcaatatctggcaaaaatggaatggcgcctagacaatcccaacctaggcaacattggatccaacaagattgttgcgactggatataagacctattacaagttgtgtatgagtatcctgaaattgctcgcttaacaccccataaagagggtgaa

SEQ ID NO: 676 - protein, 345 aa, Corynebacterium glutamicum
MSNKRIGVVIVSYGHEQDVANLVDTFADQLKTGDRVVVVDNRKPWVLKDAVGERLEKHGAEIINHDNGGFAAGCNVGAAHIVDDVDLLFFLNPDTVIDDPTLFNSLRRVDEQWAAFMPYLLLPDSTINSAGNALHISGLSWVTGLDEKPVEGSSEVTDISIASGACLAVRVDWWKRLGGMEELYFMYHEDTDFSARLLLAGGRIGLLHSAYVTHHYDYAKGDYKWIYIERNRHVLLLSVLPLPLLFVLIPQILGVNLGLWAIAAKEKRVGLKVKSLRLLIRDLPAIFKLRRSTQELAELTPSQYLAKMEWRLDNPNLGNIGSNKIVATGYKTYYKLCMSILKLLA

SEQ ID NO: 677 - DNA, 1158 bp, Corynebacterium glutamicum; identical to SEQ ID NO: 675
  CDS (101)..(1135): FRXA01574

SEQ ID NO: 678 - protein, 345 aa, Corynebacterium glutamicum; identical to SEQ ID NO: 676

SEQ ID NO: 679 - DNA, 1143 bp, Corynebacterium glutamicum
  CDS (101)..(1120): RXN01589
agggatgtagatgcgccctcatattggtacaaaaatataaattatcagcatgatttggacgctttaattcaaaaattgtaagctgttaggaggtccacaaatggtagaacaaataaaagataaactaggacgtcccatccgtgacttacggttatctgtgacagatcggtgtaactttaggtgtgattattgcatgcctaaagaggtatttggagatgatttcgtatttttacctaaaaatgaactgttaacgtttgatgaaatggctagaatcgctaaggtatatgcagaattaggtgtaaaaaaaatacgcattacaggtggagaaccattgatgcgacgcgatttagatgtacttatagctaaattaaatcaaatcgatggtattgaagatattggtttgactacaaatggtttgttattaaaaaagcatggacaaaagttatatgatgctgggctacgcagaattaatgtcagtttggatgctattgatgatacgctatttcaatcaatcaataatcgtaatattaaagcgactacgattttagaacaaattgattacgcgacgtctattggtttgaatgtaaaagtaaatgttgttatacaaaaaggtattaacgatgatcaaatcataccaatgcttgaatattttaaagataaacatatagagattcgatttatagaatttatggatgttggtaatgataatggatgggatttcagtaaagttgtaactaaagatgaaatgcttacaatgatagagcagcactttgaaatcgatcctgtagaaccaaaatattttggggaagtagcaaaatattatcgccataaggataatggtgttcaatttggtttgattacaagtgtttcacaatcattttgttctacatgtacacgcgcaaggctgtcatcagatgggaagttttacggatgtttatttgcaactgtcgatggatttaacgttaaagcgtttattcgttctggcgtgaccgacgaagaattaaaagaacaatttaaagctttatggcaaataagagatgatcgatattcagatgagagaactgctcaaacagttgccaatcgtcaacgtaaaaagataaacatgaattatattggtggttaatgtgtagggaccactacata

SEQ ID NO: 680 - protein, 340 aa, Corynebacterium glutamicum
MVEQIKDKLGRPIRDLRLSVTDRCNFRCDYCMPKEVFGDDFVFLPKNELLTFDEMARIAKVYAELGVKKIRITGGEPLMRRDLDVLIAKLNQIDGIEDIGLTTNGLLLKKHGQKLYDAGLRRINVSLDAIDDTLFQSINNRNIKATTILEQIDYATSIGLNVKVNVVIQKGINDDQIIPMLEYFKDKHIEIRFIEFMDVGNDNGWDFSKVVTKDEMLTMIEQHFEIDPVEPKYFGEVAKYYRHKDNGVQFGLITSVSQSFCSTCTRARLSSDGKFYGCLFATVDGFNVKAFIRSGVTDEELKEQFKALWQIRDDRYSDERTAQTVANRQRKKINMNYIGG

SEQ ID NO: 681 - DNA, 1425 bp, Corynebacterium glutamicum
  CDS (101)..(1402): RXN01592
gattcaatggtagaggtatttcatttcctcccattggatcacactctttttgtcgttctataataaagtctttacccggttctcaacatcaaggaacaacatggctgataacttcgaccgctctcgtgacaacgatcgctcaagcgaccgcactcctcgtggagaccgcggcgatcgcggtggctaccgaaactcccgcggcaacgatgaccgcggaaactaccgtcaaaaccgagatggtgaatcacgagatcgcggcggatacctcggtgaccgtcgcgacaaccgctcaggtgaatatcgtcaacgtgacgataggcgtgacgatcgtagggacaaccgaagcgatgaccgccgcggtggttaccgctccgatcgcaactttgacgatcgcaacagcaacatgcgtgatgatcgtcgcggcggcgaccgttcatacagccgtaatgatcgctccgatcgtggctatcgtagcaatgaccgctacgaccgtaatgatcgtcgcgatgacaacagggacaccaggggtggcgatcgcggagaccgtcgctacgacaggcgcgatgaccgacgtgatgatcgtcgcgatgatcgtcgtggcggacagggccaggggcgtccaggtggagatcgtcgacatgcgaaccgtgcaggtgcaggtcgcgatcagcagcgtgattcgctgcatccacagcgcgctggtttccgtgaagagcgcttgaacactcgtctcaatgagcctgatttgccgggcgatattgatatcaaggacttggatcctttggtcctgcaggatttgaaggttttgtctaaggacaacgcagatgccgtcgcaaagcatatgatcatggctgcgacctggctggccgacgatcctcaattggcactgcgccacgcccgtgctgcgaaggatcgcgcgggacgcgtgtccgtcgtgcgtgagacgaacggcattgctgcttaccatgctggtgagtggaaggaagctctttcggagcttcgtgctgcgcgccgcatgtcgggtggtcctggtttgattgctgtgatggctgactgtgagcgtggcttgggtcgtcctgagaaggcgattgagctggctcgagaagaggatttgagctctttggatcaggataacctgatcgagttagcgattgttgttgctggagcacgccatgatttgggtcagcatgactctgcgattgtggaattgcagaaggttaatccaagcttgaagagcaccggtttcacccattctcgtttgtcttacgcttacgccgatgcgcttgttttggctggtcgtggcgatgaagcacgtgagtggttccagcacgctgccaccttggatgaggacggctacctcgatgcagaggagcgtatcgagcagctcgataatgggaacaactagactattggtctagagtgtaa

SEQ ID NO: 682 - protein, 434 aa, Corynebacterium glutamicum
MADNFDRSRDNDRSSDRTPRGDRGDRGGYRNSRGNDDRGNYRQNRDGESRDRGGYLGDRRDNRSGEYRQRDDRRDDRRDNRSDDRRGGYRSDRNFDDRNSNMRDDRRGGDRSYSRNDRSDRGYRSNDRYDRNDRRDDNRDTRGGDRGDRRYDRRDDRRDDRRDDRRGGQGQGRPGGDRRHANRAGAGRDQQRDSLHPQRAGFREERLNTRLNEPDLPGDIDIKDLDPLVLQDLKVLSKDNADAVAKHMIMAATWLADDPQLALRHARAAKDRAGRVSVVRETNGIAAYHAGEWKEALSELRAARRMSGGPGLIAVMADCERGLGRPEKAIELAREEDLSSLDQDNLIELAIVVAGARHDLGQHDSAIVELQKVNPSLKSTGFTHSRLSYAYADALVLAGRGDEAREWFQHAATLDEDGYLDAEERIEQLDNGNN

SEQ ID NO: 683 - DNA, 1316 bp, Corynebacterium glutamicum
  CDS (1)..(1293): FRXA01592
aacttcgaccgctctcgtgacaacgatcgctcaagcgcccgcactcctcgtggagaccgcggcgatcgcggtggctaccgaaactcccgcggcaacgatgaccgcggaaactaccgtcaaaaccgagatggtgaatcacgagatcgcggcggatacctcggtgaccgtcgcgacaaccgctcaggtgaatatcgtcaacgtgacgataggcgtgacgatcgtagggacaaccgaagcgatgaccgccgcggtggttaccgctccgatcgcaactttgacgatcgcaacagcaacatgcgtgatgatcgtcgcggcggcgaccgttcatacagccgtaatgatcgctccgatcgtggctatcgtagcaatgaccgctacgaccgtaatgatcgtcgcgatgacaacagggacaccaggggtggcgatcgcggagaccgtcgctacgacaggcgcgatgaccgacgtgatgatcgtcgcgatgatcgtcgtggcggacagggccaggggcgtccaggtggagatcgtcgacatgcgaaccgtgcaggtgcaggtcgcgatcagcagcgtgattcgctgcatccacagcgcgctggtttccgtgaagagcgcttgaacactcgtctcaatgagcctgatttgccgggcgatattgatatcaaggacttggatcctttggtcctgcaggatttgaaggttttgtctaaggacaacgcagatgccgtcgcaaagcatatgatcatggctgcgacctggctggccgacgatcctcaattggcactgcgccacgcccgtgctgcgaaggatcgcgcgggacgcgtgtccgtcgtgcgtgagacgaacggcattgctgcttaccatgctggtgagtggaaggaagctctttcggagcttcgtgctgcgcgccgcatgtcgggtggtcctggtttgattgctgtgatggctgactgtgagcgtggcttgggtcgtcctgagaaggcgattgagctggctcgagaagaggatttgagctctttggatcaggataacctgatcgagttagcgattgttgttgctggagcacgccatgatttgggtcagcatgactctgcgattgtggaattgcagaaggttaatccaagcttgaagagcaccggtttcacccattctcgtttgtcttacgcttacgccgatgcgcttgttttggctggtcgtggcgatgaagcacgtgagtggttccagcacgctgccaccttggatgaggacggctacctcgatgcagaggagcgtatcgagcagctcgataatgggaacaactagactattggtctagagtgtaa

SEQ ID NO: 684 - protein, 431 aa, Corynebacterium glutamicum
NFDRSRDNDRSSARTPRGDRGDRGGYRNSRGNDDRGNYRQNRDGESRDRGGYLGDRRDNRSGEYRQRDDRRDDRRDNRSDDRRGGYRSDRNFDDRNSNMRDDRRGGDRSYSRNDRSDRGYRSNDRYDRNDRRDDNRDTRGGDRGDRRYDRRDDRRDDRRDDRRGGQGQGRPGGDRRHANRAGAGRDQQRDSLHPQRAGFREERLNTRLNEPDLPGDIDIKDLDPLVLQDLKVLSKDNADAVAKHMIMAATWLADDPQLALRHARAAKDRAGRVSVVRETNGIAAYHAGEWKEALSELRAARRMSGGPGLIAVMADCERGLGRPEKAIELAREEDLSSLDQDNLIELAIVVAGARHDLGQHDSAIVELQKVNPSLKSTGFTHSRLSYAYADALVLAGRGDEAREWFQHAATLDEDGYLDAEERIEQLDNGNN

SEQ ID NO: 685 - DNA, 1305 bp, Corynebacterium glutamicum
  CDS (101)..(1282): RXN01597
gagtagaaccacttctcgccgccagtgcataagagttttcttggaattttttaggcgcgcctccaccaaaggttgagactttggttccacaatgggctgcatgagtctgttcaaccgcaaagccgacctgcccggcctgcaaggtgccacccgaatctgcaccccgcagggcaaagggctaaagcgcctgtccgaaggcgatctcgcaatcattgatgcaccagatctatccaggaccttcgcccaacgattgctagcagcaaaacccgccgcagtcctcaacgtttcccggttcaccaccggatcggtgcccaactttggaccgcaaatgcttatcgacggcggcatccagctcgtggaaggctttggccaggagctgctcgacggcaccaaagacggtaagaaaggtcgcctgacagaagatggacagctcttctacggcgaacgactgatctctaacggcagtgttctcagtggacctgcggctgaaaatgcatttgcagacgcccagcaatcactgctggaccgcatggaagcctatttcggcaacaccattcagttcattcactcagaagcaccgctcctgatcgatggcctcggcattcccgataccggaaatgccattgaaggccgcaaagttctcattgcctcaccaggggataaccaccgcagcaggctcaaagaactccgcagcttcatccgcgaatacgatccagtactcatcggtgtcgatggggcagcagacaccttggtggaattggggtacaagcccgcgctgatcgtcggcaatcccactggtatcggcgcagatgcgctgcgcagtggcgccaacgtaattttgccagctgatccagacggccacgctgttggtctggagcgcatccaggatcttggcatcggtgcgatgaccttcccatcctcagtaaattcctccacggatctggcgctcctgcttgcggatttccacaacccgcagatgatcgtcaacgtcggcggtcctgtcacccttgatggtgtttttgaaaaccgagaagattccgatcccgcggcgcttttgacgcgcgccaagctaggcaccaagcttgtcgacggatccgtcatcgcaagtctttacacagtgcgcagctccagcaaccttggatggatgtgggcactgttagccattttggtggttcttgcagtcgtgattgttatcgctggcaccgcaggatcaggctcttttaccgacaacctcattgacacctggaacagcttcgcgctgacagtgcagggttggttcaaataggaaggcaacatggctaaacg

SEQ ID NO: 686 - protein, 394 aa, Corynebacterium glutamicum
MSLFNRKADLPGLQGATRICTPQGKGLKRLSEGDLAIIDAPDLSRTFAQRLLAAKPAAVLNVSRFTTGSVPNFGPQMLIDGGIQLVEGFGQELLDGTKDGKKGRLTEDGQLFYGERLISNGSVLSGPAAENAFADAQQSLLDRMEAYFGNTIQFIHSEAPLLIDGLGIPDTGNAIEGRKVLIASPGDNHRSRLKELRSFIREYDPVLIGVDGAADTLVELGYKPALIVGNPTGIGADALRSGANVILPADPDGHAVGLERIQDLGIGAMTFPSSVNSSTDLALLLADFHNPQMIVNVGGPVTLDGVFENREDSDPAALLTRAKLGTKLVDGSVIASLYTVRSSSNLGWMWALLAILVVLAVVIVIAGTAGSGSFTDNLIDTWNSFALTVQGWFK

SEQ ID NO: 687 - DNA, 1305 bp, Corynebacterium glutamicum; identical to SEQ ID NO: 685
  CDS (101)..(1282): FRXA01597

SEQ ID NO: 688 - protein, 394 aa, Corynebacterium glutamicum; identical to SEQ ID NO: 686

SEQ ID NO: 689 - DNA, 1086 bp, Corynebacterium glutamicum
  CDS (101)..(1063): RXN01598
cgctggcaccgcaggatcaggctcttttaccgacaacctcattgacacctggaacagcttcgcgctgacagtgcagggttggttcaaataggaaggcaacatggctaaacgacgtggaagaggcgccgcaaccttcgccgcactgggatttggtgcagcagccggcattgcctttggaacttatgtgcttgcacccaaccttcctgaaaacattgacccaaatgcaccaacatcagctgaattagtcgaggcagagaccttggctgaggttaatgcggtgcaggccgatcaagcagacagcatcattgaccacatcgtggaagacgtggtggctggcacactgaccgatcgccccgtactggtgatgcgcaccgctgacgctgaagaatcagacgttgccgatgtgtcatggctgttgcagcaagcaggagctattaatgctggatccattacacttgaggagaatttcttctcccaagacggcgcggaccagctgaaatcaatcgtggcaaatacgttgcctgcaggcgctcagctttctgaaacccaactggatccaggaactcacgctggcgaggcacttggtgccgctttgctgctcaaccctgaaactggtgaaccactagccagcactgcagagcgcggactattgctcaacgtgctgcgcgacaacggttacatctcgtacgaagacggcaccattttgccaggccaggtcatcgtgatgattactggcgatagcgacggctcaggtgatggtgccttcgctgcagaaacacaatcgctgtttgctcgcgcacttgacgcccaaggatcaggcgtggtggttgcaggacgtattcacactgctgctgatactggagttattggacggcttcgtgccaaccctgatgctgcagaaaacgtctctacaattgattccgtgaatcgtacttggggcaagatggctaccgtgctatcagttcgtgaggaactagccggtaggtctggagcgtttggttccgctgcctccgcagacgcggcaagtccgtctctcgatggaactgcagcagcgccagcgcagtaggttttccaagcctttaaaac

SEQ ID NO: 690 - protein, 321 aa, Corynebacterium glutamicum
MAKRRGRGAATFAALGFGAAAGIAFGTYVLAPNLPENIDPNAPTSAELVEAETLAEVNAVQADQADSIIDHIVEDVVAGTLTDRPVLVMRTADAEESDVADVSWLLQQAGAINAGSITLEENFFSQDGADQLKSIVANTLPAGAQLSETQLDPGTHAGEALGAALLLNPETGEPLASTAERGLLLNVLRDNGYISYEDGTILPGQVIVMITGDSDGSGDGAFAAETQSLFARALDAQGSGVVVAGRIHTAADTGVIGRLRANPDAAENVSTIDSVNRTWGKMATVLSVREELAGRSGAFGSAASADAASPSLDGTAAAPAQ

SEQ ID NO: 691 - DNA, 1086 bp, Corynebacterium glutamicum; identical to SEQ ID NO: 689
  CDS (101)..(1063): FRXA01598

SEQ ID NO: 692 - protein, 321 aa, Corynebacterium glutamicum; identical to SEQ ID NO: 690

SEQ ID NO: 693 - DNA, 507 bp, Corynebacterium glutamicum
  CDS (101)..(484): RXN01618
ggccgtgcgcgcctccagcgagcctggccgtgccggaaaagtgctcattcgtttctaaacgtttaaggcccattagacccctgatttaaaaggatctcacatgatcattatcggagcagttttcgccatcctcgcagttctactgcatgttttcatcttctacatggaatcattcgcatggactagtgagaaagcacgtggagttttcggcaccaccgaaatcgacgccgaaaacaccaaggagatggcctacaaccaaggcttctacaacttcttcctggcagtcatcgccggcgtgggtgttgcgttcctcttcgctggttcaactggcatcggcgcagccctcgcactcgctggcaccggttccatgctggcagccgctgcagtgttggctttgagctcacccgacaagcgtggtgcagccttcaagcaaggcacgttcccgctgctcgcagtggtgttccttgtgattggattgctggtttaagcagttttttaaaggaactt

SEQ ID NO: 694 - protein, 128 aa, Corynebacterium glutamicum
MIIIGAVFAILAVLLHVFIFYMESFAWTSEKARGVFGTTEIDAENTKEMAYNQGFYNFFLAVIAGVGVAFLFAGSTGIGAALALAGTGSMLAAAAVLALSSPDKRGAAFKQGTFPLLAVVFLVIGLLV

SEQ ID NO: 695 - DNA, 507 bp, Corynebacterium glutamicum; identical to SEQ ID NO: 693
  CDS (101)..(484): FRXA01618

SEQ ID NO: 696 - protein, 128 aa, Corynebacterium glutamicum; identical to SEQ ID NO: 694

SEQ ID NO: 697 - DNA, 675 bp, Corynebacterium glutamicum
  CDS (101)..(652): RXN01634
attggatctaggaaaaattatgaacatctcaaagctcggactgaggatcgcggtcacagcaacggcgaccacaacggcgcttgccctcggtggcacgcacatggcagttggtcaagaaactgatctgctcaacgctatggaaacactcgctggggttccctcagacttggtggtcactgaaatcctccccgataccaccagctatgacaattttgaattctttgaagttcacaacaccggcagtgcacccgtgaccattggggaaggggagtacaccttcgcctattcctttgacgattccgccgatacgtcccgcgacaaggcactggatcttggcggggaagtcacggtagatgcaggcgaaaccattgtggtgtggattgagtactccagttcaactgttgataccgctgcgtttagtgagcaagacttccgtgatttctacggcatggattcctcagcccgcatcttccgagcaactggccaggcgggtctcgctaacggtggtgatcgtggcatccgagttctgtacaatggtgaagtttctggttggtcccactacccatcagatagcgcagcggttcaaaagggaattgacttcgcgctgccaaaagtaggggagcaggccagcattgcaagtgcgcaccaaaactgatccaactccaggatcaatta

SEQ ID NO: 698 - protein, 184 aa, Corynebacterium glutamicum
MAVGQETDLLNAMETLAGVPSDLVVTEILPDTTSYDNFEFFEVHNTGSAPVTIGEGEYTFAYSFDDSADTSRDKALDLGGEVTVDAGETIVVWIEYSSSTVDTAAFSEQDFRDFYGMDSSARIFRATGQAGLANGGDRGIRVLYNGEVSGWSHYPSDSAAVQKGIDFALPKVGEQASIASAHQN

SEQ ID NO: 699 - DNA, 675 bp, Corynebacterium glutamicum; identical to SEQ ID NO: 697
  CDS (101)..(652): FRXA01634

SEQ ID NO: 700 - protein, 184 aa, Corynebacterium glutamicum; identical to SEQ ID NO: 698

SEQ ID NO: 701 - DNA, 864 bp, Corynebacterium glutamicum
  CDS (101)..(841): RXN01635
agggaattgacttcgcgctgccaaaagtaggggagcaggccagcattgcaagtgcgcaccaaaactgatccaactccaggatcaattacttctgatcaagttgattcctggcggattggacactccagaagagcctgaagcccctgaagactctctttttgaagggcgcactccccctagggatgcaagcacccgcttgatcctcactgaactaatggtcaactccaccaacatgggcagttctgatggttttgagtatgtggaaatcaccaacactactgccgaacccatcgatttttccgattacaccttgaactacctgtacccgcaggatgagttcaccaacaccaacgaagccgtctgggctgcggaacctggtgatgtcattattcagcctggaaaatctctcgtgttttggatcaaaaatggccccaatgatgaggcaaccgcagcagatttcaatgcagaatatggcaccaacctggaggctggaaaagaccttgttgaaatctcctcaggtgggatggccaatggtactgccagaggaatgcagattcagaccaacactggccacatagtcaaccgtggtttctacaacatggctggcgcttctgatgtgaaagccaacgagggtcttcatttcgcagtggatgagtctgatcttctgaagcaaacgcttgtcggcagcggtgcgccaaccccgggcactgtgtacacttcgcagattcctaatccactgtctgccgttatcgctgattcttctgtaccactcatcacagataataccgcaaccagtatcaaccctgcggagccgtttaccttcgccttcaaatatcaccgatgatgtccaggtgcgcacggcaa

SEQ ID NO: 702 - protein, 247 aa, Corynebacterium glutamicum
LIPGGLDTPEEPEAPEDSLFEGRTPPRDASTRLILTELMVNSTNMGSSDGFEYVEITNTTAEPIDFSDYTLNYLYPQDEFTNTNEAVWAAEPGDVIIQPGKSLVFWIKNGPNDEATAADFNAEYGTNLEAGKDLVEISSGGMANGTARGMQIQTNTGHIVNRGFYNMAGASDVKANEGLHFAVDESDLLKQTLVGSGAPTPGTVYTSQIPNPLSAVIADSSVPLITDNTATSINPAEPFTFAFKYHR

SEQ ID NO: 703 - DNA, 864 bp, Corynebacterium glutamicum; identical to SEQ ID NO: 701
  CDS (101)..(841): FRXA01635

SEQ ID NO: 704 - protein, 247 aa, Corynebacterium glutamicum; identical to SEQ ID NO: 702

SEQ ID NO: 705 - DNA, 1293 bp, Corynebacterium glutamicum
  CDS (101)..(1270): RXN01647
gctgggggaatacatggctgaaggcatgttgatgcccacgacatcggcgcaggtgtcggggcataaatttctggtgcggcgcatcgaacatgggttggtgatgggcgatgtgcgcatgattcatgatccacttggtaggcgccggcgggcgttggtgtttggggtggtggcgtgcgtgatgttggcggtgggatcattggcgttggctatttttcgacccgcgaaggatccggccgatgcgccgttgatccgctctgaatccggcgcgctctttgtgcagctggatgggtcggtgcatccggtggctaatgtggcctcggctcggttgattgtgggggagccggtggatccggtgaacgccagcgatgcgatcatcgcgggcatgccgcgcggagtgccggtgggggttcctgatgcgccggggcttttcagcagcaccgaagaacccgagcaagattggtttgtgtgccaggatgtcggcactggggatctacacattacggttcctaggggcggactagggcccaccctgattgcggaaggaaatgggtggctgggggcgtcgaaaagcgaaaccggcgaggtcacctggaacctgattaccgcggacgggcgccgcgaactgccggcgtggggcagcgaacatgggcgcattatgcgccgccacctggggatttccgaggacaccccgcgcgtatacctgaccactgagctgctcaacgcgatccccgagcacgacgcggtccgcttcccagccccgctgcccgagcttgtcgacgcctccacccgcaactggttacggctcgacggggcgctcgccgaaatcacgccgctacagcgcgggttgcttatcgacgccggttccggtgttttccccgaccccaccgcgcttcttggtgtgcatgaagaaacagccaacaccttgacgctgcccgagcaaacagtttcttggcaagatctggacggtggttttgcctgcgcggatggtgaaggccagatcggtttcctggaaactctggaatcgggggtggcgctatctggtgattccagggcgaaaagtttcagcacaaacgctggtggggcagtgggcgtggacagtggctttggctactatgtggtctctgattttgggctgatgcaccctgtttctactggtgaatcgatggttgccctaggaatcactgacgtgcaggtcgtgccgtggagcgtgctgcgattgttgccgcagggaagtgaattagcaaaagagacagcgctcgcgcccacctattaaggagtatggtggccttacat

SEQ ID NO: 706 - protein, 390 aa, Corynebacterium glutamicum
MGDVRMIHDPLGRRRRALVFGVVACVMLAVGSLALAIFRPAKDPADAPLIRSESGALFVQLDGSVHPVANVASARLIVGEPVDPVNASDAIIAGMPRGVPVGVPDAPGLFSSTEEPEQDWFVCQDVGTGDLHITVPRGGLGPTLIAEGNGWLGASKSETGEVTWNLITADGRRELPAWGSEHGRIMRRHLGISEDTPRVYLTTELLNAIPEHDAVRFPAPLPELVDASTRNWLRLDGALAEITPLQRGLLIDAGSGVFPDPTALLGVHEETANTLTLPEQTVSWQDLDGGFACADGEGQIGFLETLESGVALSGDSRAKSFSTNAGGAVGVDSGFGYYVVSDFGLMHPVSTGESMVALGITDVQVVPWSVLRLLPQGSELAKETALAPTY

SEQ ID NO: 707 - DNA, 911 bp, Corynebacterium glutamicum
  CDS (1)..(888): FRXA01647
atgccgcgcggagtgccggtgggggttcctgatgcgccggggcttttcagcagcaccgaagaacccgagcaagattggtttgtgtgccaggatgtcggcactggggatctacacattacggttcctaggggcggactagggcccaccctgattgcggaaggaaatgggtggctgggggcgtcgaaaagcgaaaccggcgaggtcacctggaacctgattaccgcggacgggcgccgcgaactgccggcgtggggcagcgaacatgggcgcattatgcgccgccacctggggatttccgaggacaccccgcgcgtatacctgaccactgagctgctcaacgcgatccccgagcacgacgcggtccgcttcccagccccgctgcccgagcttgtcgacgcctccacccgcaactggttacggctcgacggggcgctcgccgaaatcacgccgctacagcgcgggttgcttatcgacgccggttccggtgttttccccgaccccaccgcgcttcttggtgtgcatgaagaaacagccaacaccttgacgctgcccgagcaaacagtttcttggcaagatctggacggtggttttgcctgcgcggatggtgaaggccagatcggtttcctggaaactctggaatcgggggtggcgctatctggtgattccagggcgaaaagtttcagcacaaacgctggtggggcagtgggcgtggacagtggctttggctactatgtggtctctgattttgggctgatgcaccctgtttctactggtgaatcgatggttgccctaggaatcactgacgtgcaggtcgtgccgtggagcgtgctgcgattgttgccgcagggaagtgaattagcaaaagagacagcgctcgcgcccacctattaaggagtatggtggccttacat

SEQ ID NO: 708 - protein, 296 aa, Corynebacterium glutamicum
MPRGVPVGVPDAPGLFSSTEEPEQDWFVCQDVGTGDLHITVPRGGLGPTLIAEGNGWLGASKSETGEVTWNLITADGRRELPAWGSEHGRIMRRHLGISEDTPRVYLTTELLNAIPEHDAVRFPAPLPELVDASTRNWLRLDGALAEITPLQRGLLIDAGSGVFPDPTALLGVHEETANTLTLPEQTVSWQDLDGGFACADGEGQIGFLETLESGVALSGDSRAKSFSTNAGGAVGVDSGFGYYVVSDFGLMHPVSTGESMVALGITDVQVVPWSVLRLLPQGSELAKETALAPTY

SEQ ID NO: 709 - DNA, 1856 bp, Corynebacterium glutamicum
  CDS (1)..(1833): RXN01658
gatccacagatcctgtcaccaaccttcacccagcaacagcagctgcgaaacttctacggtttcccagaccagctggcgatggaccgctttgaagtagatggcaaactccgcgactttgttgtggcagcacgtgagctcgatccaaacgccctgcagcaaaaccagcaggactggattaaccgtcacactgtttatacccacggcaacggcttcattgcagctcaagcaaaccaggtggatgaggtcgcccgcgacgtcggatccactcgtggtggttaccctgtctacaccgtctctgatttgcagtcgaatgctcgtgctgcagaaagcgaagatgctgaggagcttggcatcaaggttgatgagcctcgtgtgtactacggaccactgattgcttctgcgactgatggtgctgactacgcaattgtcggtgacaccggcgatggcccagtcgagtacgacactgacacctccagctacacctacgaaggtgctggcggcgtggacattggaaacatggtcaaccgtgcgatgtttgcattgcgctaccaggaaatgaacatgctcctgtctgatcgtgttggttccgaatccaagatcctatttgagcgcgatcctcgttcccgtgtggaaaaggttgcaccttggttgaccactgactccaagacctacccaactgtgattgatggtcgcatcaagtggatcgtcgatggctacaccaccttggatagtcttccgtactccacgcgcacctcactgacggaagcgactcaggatgctgtcatgcctgacggcaccccacagccactgatcacagatagggtcggttacatccgcaactccgtgaaggctgttgttgatgcgtacgacggaactgttgaactctacgaattcgacaccgaagatcctgttctgaaggcatggcgtggcgtgttcccagacaccgtgaaggacgggtcggagatttccgatgagcttcgcgcacacctgcgttacccagaagatttgttcaaggtccagcgtgacatgctggccaagtacaacgttgatgattctggaacattcttcaccaacgatgcgttctggtctgtcccaggtgacccaactgcagcggagggccgccaggaacttaagcagcctccttactacgtggtggcagcagacccagagaccggtgagtccagcttccagctgatcaccccgttccgtggacttcagcgcgagtacctctctgcacacatgtctgcgtcgtctgatccagttacctacggtgaaatcactgttcgtgtgctgcctaccgattctgtgacccagggtccaaagcaggcccaggatgcgatgatgtcatctgaccaggttgctcaggaccaaacactgtggcgtggatcgaacgatctgcacaacggaaacctgttgaccttgccagttggtggcggagagatcctctacgttgagccgatttactcgcagcgcaaggatcaggcatcggccttcccgaagcttctgcgcgtgctggtcttctacaagggtcaggttggttacgcaccaacgatcgctgaagccctatcgcaggtcggcattgatccgaaggaagcgcaggacatcgaagaggtagatggcaccgctacgacgccatcgactgatgagactgacactgacactgatcagcctgcaaccgaaaccccaactgcaccagtgagtgaggcggaaggaatcgcggccatcaacgatgcgttgagcaaccttgaagctgctcgcgatagctctttcgaagagtatggtcgtgcactcgatgcgcttgatcgtgccgtcgatagctaccagtccgcacagtagcgtttgagtaaacagcccga

SEQ ID NO: 710 - protein, 611 aa, Corynebacterium glutamicum
DPQILSPTFTQQQQLRNFYGFPDQLAMDRFEVDGKLRDFVVAARELDPNALQQNQQDWINRHTVYTHGNGFIAAQANQVDEVARDVGSTRGGYPVYTVSDLQSNARAAESEDAEELGIKVDEPRVYYGPLIASATDGADYAIVGDTGDGPVEYDTDTSSYTYEGAGGVDIGNMVNRAMFALRYQEMNMLLSDRVGSESKILFERDPRSRVEKVAPWLTTDSKTYPTVIDGRIKWIVDGYTTLDSLPYSTRTSLTEATQDAVMPDGTPQPLITDRVGYIRNSVKAVVDAYDGTVELYEFDTEDPVLKAWRGVFPDTVKDGSEISDELRAHLRYPEDLFKVQRDMLAKYNVDDSGTFFTNDAFWSVPGDPTAAEGRQELKQPPYYVVAADPETGESSFQLITPFRGLQREYLSAHMSASSDPVTYGEITVRVLPTDSVTQGPKQAQDAMMSSDQVAQDQTLWRGSNDLHNGNLLTLPVGGGEILYVEPIYSQRKDQASAFPKLLRVLVFYKGQVGYAPTIAEALSQVGIDPKEAQDIEEVDGTATTPSTDETDTDTDQPATETPTAPVSEAEGIAAINDALSNLEAARDSSFEEYGRALDALDRAVDSYQSAQ

SEQ ID NO: 711 - DNA, 1485 bp, Corynebacterium glutamicum
  CDS (1)..(1485): FRXA01658
gatccacagatcctgtcaccaaccttcacccagcaacagcagctgcgaaacttctacggtttcccagaccagctggcgatggaccgctttgaagtagatggcaaactccgcgactttgttgtggcagcacgtgagctcgatccaaacgccctgcagcaaaaccagcaggactggattaaccgtcacactgtttatacccacggcaacggcttcattgcagctcaagcaaaccaggtggatgaggtcgcccgcgacgtcggatccactcgtggtggttaccctgtctacaccgtctctgatttgcagtcgaatgctcgtgctgcagaaagcgaagatgctgaggagcttggcatcaaggttgatgagcctcgtgtgtactacggaccactgattgcttctgcgactgatggtgctgactacgcaattgtcggtgacaccggcgatggcccagtcgagtacgacactgacacctccagctacacctacgaaggtgctggcggcgtggacattggaaacatggtcaaccgtgcgatgtttgcattgcgctaccaggaaatgaacatgctcctgtctgatcgtgttggttccgaatccaagatcctatttgagcgcgatcctcgttcccgtgtggaaaaggttgcaccttggttgaccactgactccaagacctacccaactgtgattgatggtcgcatcaagtggatcgtcgatggctacaccaccttggatagtcttccgtactccacgcgcacctcactgacggaagcgactcaggatgctgtcatgcctgacggcaccccacagccactgatcacagatagggtcggttacatccgcaactccgtgaaggctgttgttgatgcgtacgacggaactgttgaactctacgaattcgacaccgaagatcctgttctgaaggcatggcgtggcgtgttcccagacaccgtgaaggacgggtcggagatttccgatgagcttcgcgcacacctgcgttacccagaagatttgttcaaggtccagcgtgacatgctggccaagtacaacgttgatgattctggaacattcttcaccaacgatgcgttctggtctgtcccaggtgacccaactgcagcggagggccgccaggaacttaagcagcctccttactacgtggtggcagcagacccagagaccggtgagtccagcttccagctgatcaccccgttccgtggacttcagcgcgagtacctctctgcacacatgtctgcgtcgtctgatccagttacctacggtgaaatcactgttcgtgtgctgcctaccgattctgtgacccagggtccaaagcaggcccaggatgcgatgatgtcatctgaccaggttgctcaggaccaaacactgtggcgtggatcgaacgatctgcacaacggaaacctgttgaccttgccagttggtggcggagagatcctctacgttgagccgatttactcgcagcgcaaggatcaggca

SEQ ID NO: 712 - protein, 495 aa, Corynebacterium glutamicum
DPQILSPTFTQQQQLRNFYGFPDQLAMDRFEVDGKLRDFVVAARELDPNALQQNQQDWINRHTVYTHGNGFIAAQANQVDEVARDVGSTRGGYPVYTVSDLQSNARAAESEDAEELGIKVDEPRVYYGPLIASATDGADYAIVGDTGDGPVEYDTDTSSYTYEGAGGVDIGNMVNRAMFALRYQEMNMLLSDRVGSESKILFERDPRSRVEKVAPWLTTDSKTYPTVIDGRIKWIVDGYTTLDSLPYSTRTSLTEATQDAVMPDGTPQPLITDRVGYIRNSVKAVVDAYDGTVELYEFDTEDPVLKAWRGVFPDTVKDGSEISDELRAHLRYPEDLFKVQRDMLAKYNVDDSGTFFTNDAFWSVPGDPTAAEGRQELKQPPYYVVAADPETGESSFQLITPFRGLQREYLSAHMSASSDPVTYGEITVRVLPTDSVTQGPKQAQDAMMSSDQVAQDQTLWRGSNDLHNGNLLTLPVGGGEILYVEPIYSQRKDQA

SEQ ID NO: 713 - DNA, 669 bp, Corynebacterium glutamicum
  CDS (101)..(646): RXN01659
ttgatgcgcgccgcggtgagcagcctgccgatccagagcgtgaagaatctgatgatttagtcgagattgataccgtctctggattccgcctgctcagtacgtggcgggggttgcgcagcgttttgtcgacgagcgcattcacgtcggtttggattccatgccagaagctgtgactgctgtgtggatggaatctgattgggtgttggcggaaaccatcaagggttccacgccttccgattgggaagagattttgcggccgttggcgctgctcacggacgcgtctttcacgttgccacctcgttccacgcgtgcgcaaaccttggatttgaagcatttggaaccaagccgtctgaagccggagcagccagaaaagccagcgtttactcccaatgcttcggaagaagatttgtctcagccgttggtgatccgccccgaggagccgttgcagatgccggttcgcggtgtgcaggaaagccgcggagtggtcgagccacggtcattgggtgcggatgatgtggagtcgattgcggagggcgatccagagcgtccgagcgatctttatggcacgcgtgtgctgcgtgatctcaatggtcagtccagtattttccaagattccaccgacgcggatgagccaccaaaaaagtggtagaaaactggtgtttttcggcc

SEQ ID NO: 714 - protein, 182 aa, Corynebacterium glutamicum
VAGVAQRFVDERIHVGLDSMPEAVTAVWMESDWVLAETIKGSTPSDWEEILRPLALLTDASFTLPPRSTRAQTLDLKHLEPSRLKPEQPEKPAFTPNASEEDLSQPLVIRPEEPLQMPVRGVQESRGVVEPRSLGADDVESIAEGDPERPSDLYGTRVLRDLNGQSSIFQDSTDADEPPKKW

SEQ ID NO: 715 - DNA, 509 bp, Corynebacterium glutamicum
  CDS (1)..(486): FRXA01659
ccagaagctgtgactgctgtgtggatggaatctgattgggtgttggcggaaaccatcaagggttccacgccttccgattgggaagagattttgcggccgttggcgctgctcacggacgcgtctttcacgttgccacctcgttccacgcgtgcgcaaaccttggatttgaagcatttggaaccaagccgtctgaagccggagcagccagaaaagccagcgtttactcccaatgcttcggaagaagatttgtctcagccgttggtgatccgccccgaggagccgttgcagatgccggttcgcggtgtgcaggaaagccgcggagtggtcgagccacggtcattgggtgcggatgatgtggagtcgattgcggagggcgatccagagcgtccgagcgatctttatggcacgcgtgtgctgcgtgatctcaatggtcagtccagtattttccaagattccaccgacgcggatgagccaccaaaaaagtggtagaaaactggtgtttttcggcc

SEQ ID NO: 716 - protein, 162 aa, Corynebacterium glutamicum
PEAVTAVWMESDWVLAETIKGSTPSDWEEILRPLALLTDASFTLPPRSTRAQTLDLKHLEPSRLKPEQPEKPAFTPNASEEDLSQPLVIRPEEPLQMPVRGVQESRGVVEPRSLGADDVESIAEGDPERPSDLYGTRVLRDLNGQSSIFQDSTDADEPPKKW

SEQ ID NO: 717 - DNA, 981 bp, Corynebacterium glutamicum
  CDS (101)..(958): RXN01663
tattttgctggttggtcacagtggagcgctaaccccgagaatcctatcgaggcctaaaatcgtggcttgagtacgcactgccagtaaggtgtgtgatgtgatggaaataagtgtcttgatcatcgccgcactgatcttggtggcaggcatcgtactgtggcgcgcggactcgtctaaacaggcagctaaaaaggctgaatcacctgtgggctcagtcgcacctgcgcccgtgctggttgaagaagagccggaccctgagtttgagccagaactggaccctgaaccagaagcgcaaccagaaccagagctggaagttgcgcctagatttgcgccagaaccagttcaagatcttgagccggatcaggctgaggacatttattttgatgattcccctgaactcgatgctgatgttgaaaatgccttggctgagcttactgaggtagaagactacccggaagagccagtgcagtctgagcaacctcaagcccctgccacggcggaggtagctgcggacgaggagcaacggggcgtcgataagcattcgtttttgagctctttgcctggttcgcagcgccgggagcgccgaaactgggcggcgaagcaccacttcgatttcatcaaggaagatgcctttttgaccgatgaatggtcaaggggtgcggcatcgactggtgccgttgcacgtgatgtggtcagtggcatggctgaaggatatgaaacgcatctggtggatttggcgggcgtgcccgtgatggcgatgcgccgtggaattacctctgacgtggtcattgatgcgcgccgcggtgagcagcctgccgatccagagcgtgaagaatctgatgatttagtcgagattgataccgtctctggattccgcctgctcagtacgtggcgggggttgcgcagcgttttgtcgacgagcgcattcacgtcggtttggattccatgccagaagctgtgactgctgtgtggatggaatct

SEQ ID NO: 718 - protein, 286 aa, Corynebacterium glutamicum
MEISVLIIAALILVAGIVLWRADSSKQAAKKAESPVGSVAPAPVLVEEEPDPEFEPELDPEPEAQPEPELEVAPRFAPEPVQDLEPDQAEDIYFDDSPELDADVENALAELTEVEDYPEEPVQSEQPQAPATAEVAADEEQRGVDKHSFLSSLPGSQRRERRNWAAKHHFDFIKEDAFLTDEWSRGAASTGAVARDVVSGMAEGYETHLVDLAGVPVMAMRRGITSDVVIDARRGEQPADPEREESDDLVEIDTVSGFRLLSTWRGLRSVLSTSAFTSVWIPCQKL

SEQ ID NO: 719 - DNA, 535 bp, Corynebacterium glutamicum
  CDS (101)..(535): FRXA01663
tattttgctggttggtcacagtggagcgctaaccccgagaatcctatcgaggcctaaaatcgtggcttgagtacgcactgccagtaaggtgtgtgatgtgatggaaataagtgtcttgatcatcgccgcactgatcttggtggcaggcatcgtactgtggcgcgcggactcgtctaaacaggcagctaaaaaggctgaatcacctgtgggctcagtcgcacctgcgcccgtgctggttgaagaagagccggaccctgagtttgagccagaactggaccctgaaccagaagcgcaaccagaaccagagctggaagttgcgcctagatttgcgccagaaccagttcaagatcttgagccggatcaggctgaggacatttattttgatgattcccctgaactcgatgctgatgttgaaaatgccttggctgagcttactgaggtagaagactacccggaagagccagtgcagtctgagcaacctcaagcccctgccacggcggaggtagctgcggacgaggagcaacggggcgtcgat

SEQ ID NO: 720 - protein, 145 aa, Corynebacterium glutamicum
MEISVLIIAALILVAGIVLWRADSSKQAAKKAESPVGSVAPAPVLVEEEPDPEFEPELDPEPEAQPEPELEVAPRFAPEPVQDLEPDQAEDIYFDDSPELDADVENALAELTEVEDYPEEPVQSEQPQAPATAEVAADEEQRGVD

SEQ ID NO: 721 - DNA, 1038 bp, Corynebacterium glutamicum
  CDS (101)..(1015): RXN01669
cacccacagtcaccaagaacatagccactccacacacaaccactccacacacaaccacgagggtcacgaccaccatcaccccaccggattcaaaggatttttgtacgagattttcgttccacactcccatgacaccgccgactcgattgatgatgctatggaggcgaactcagagggtattcgagcgctgaagtttagccttgtattgatgctgctcacgacggttttgcaggctatcattgtgtctttttctggatctgttgcactgttggcggatacggttcacaacctttccgacgcattgactgcgattcctctttggattgctttcatactttcccggcgcgcagcgactcaaaaatatacgtatggattcaatcgtgcagaggatttagcggggttgtttattgtcgcgatgattgctctttcggcgattgttgctgcatggcaggcgatcgaccggatgattaatcctcgcccgatggagaatattgaatgggtgattgcggcaggtgttattggtttcttaggaaatgaggctgtggcaatgtatcgcattcgggttggtaagaggattggctcggctgctttggttgcagatggcgttcatgctcgcacggatggttttacttcacttgcagttgtcgcaggtggtgttggagtttttctgggattccccctggctgacccaattatcggattgatcatttctgcgatgattgccacccttcttgttggtacgatccgttcggttggcagacgcctcatggatggaattgagccggagttggtagagaaggctacgcacgcgatctggcatgtgaaggaaattgagtcgattgatcgactgaggttgaggtgggttggacaccgtcttcacggcgatgccacggtcagcacttctacatcatcgctatcggaagccaccgcaatcgcccttgaggctgagctttccgtcaaacaacatcttcccaatgtggatgaaatgactgtgaccatcaccccttccaaaccttgagtcccgtgatacaattgttg

SEQ ID NO: 722 - protein, 305 aa, Corynebacterium glutamicum
LYEIFVPHSHDTADSIDDAMEANSEGIRALKFSLVLMLLTTVLQAIIVSFSGSVALLADTVHNLSDALTAIPLWIAFILSRRAATQKYTYGFNRAEDLAGLFIVAMIALSAIVAAWQAIDRMINPRPMENIEWVIAAGVIGFLGNEAVAMYRIRVGKRIGSAALVADGVHARTDGFTSLAVVAGGVGVFLGFPLADPIIGLIISAMIATLLVGTIRSVGRRLMDGIEPELVEKATHAIWHVKEIESIDRLRLRWVGHRLHGDATVSTSTSSLSEATAIALEAELSVKQHLPNVDEMTVTITPSKP

SEQ ID NO: 723 - DNA, 755 bp, Corynebacterium glutamicum
  CDS (1)..(732): FRXA01669
cacaacctttccgacgcattgactgcgattcctctttggattgctttcatactttcccggcgcgcagcgactcaaaaatatacgtatggattcaatcgtgcagaggatttagcggggttgtttattgtcgcgatgattgctctttcggcgattgttgctgcatggcaggcgatcgaccggatgattaatcctcgcccgatggagaatattgaatgggtgattgcggcaggtgttattggtttcttaggaaatgaggctgtggcaatgtatcgcattcgggttggtaagaggattggctcggctgctttggttgcagatggcgttcatgctcgcacggatggttttacttcacttgcagttgtcgcaggtggtgttggagtttttctgggattccccctggctgacccaattatcggattgatcatttctgcgatgattgccacccttcttgttggtacgatccgttcggttggcagacgcctcatggatggaattgagccggagttggtagagaaggctacgcacgcgatctggcatgtgaaggaaattgagtcgattgatcgactgaggttgaggtgggttggacaccgtcttcacggcgatgccacggtcagcacttctacatcatcgctatcggaagccaccgcaatcgcccttgaggctgagctttccgtcaaacaacatcttcccaatgtggatgaaatgactgtgaccatcaccccttccaaaccttgagtcccgtgatacaattgttg

SEQ ID NO: 724 - protein, 244 aa, Corynebacterium glutamicum
HNLSDALTAIPLWIAFILSRRAATQKYTYGFNRAEDLAGLFIVAMIALSAIVAAWQAIDRMINPRPMENIEWVIAAGVIGFLGNEAVAMYRIRVGKRIGSAALVADGVHARTDGFTSLAVVAGGVGVFLGFPLADPIIGLIISAMIATLLVGTIRSVGRRLMDGIEPELVEKATHAIWHVKEIESIDRLRLRWVGHRLHGDATVSTSTSSLSEATAIALEAELSVKQHLPNVDEMTVTITPSKP

SEQ ID NO: 725 - DNA, 465 bp, Corynebacterium glutamicum
  CDS (101)..(442): RXN01672
agtagcaaagggtgcagtcgaaggaccagcatccaagactgctgccgaagaaaccgactccgttgacaacggatccgacgaaaacggcgaggaataatttatggcatcccgagaagtatccatcacccgaatctcaccactagcaaccttccgagttgcactggcaatgtccatcatcggactcgtggcgtggatcatctgcgtaaccgtcctctatttcggacttaacgtggctggcgtctggcagaacttcaacgatgtcatcggcggtgttggtgcagaacaaaccatcaccttcgggctcgtcctgagcatttccgcacttctgggagctatcggagcgattaccgtcgctgtgcttgcaccattgtgtgcaatcatctacaactcgattgttgacctcttcggtggactgcagattcaactgcaagaagaagtagactaacctctgaaacacaaacccct

SEQ ID NO: 726 - protein, 114 aa, Corynebacterium glutamicum
MASREVSITRISPLATFRVALAMSIIGLVAWIICVTVLYFGLNVAGVWQNFNDVIGGVGAEQTITFGLVLSISALLGAIGAITVAVLAPLCAIIYNSIVDLFGGLQIQLQEEVD

SEQ ID NO: 727 - DNA, 332 bp, Corynebacterium glutamicum
  CDS (1)..(309): FRXA01672
tcaccactagcaaccttccgagttgcactggcaatgtccatcatcggactcgtggcgtggatcatctgcgtaaccgtcctctatttcggacttaacgtggctggcgtctggcagaacttcaacgatgtcatcggcggtgttggtgcagaacaaaccatcaccttcgggctcgtcctgagcatttccgcacttctgggagctatcggagcgattaccgtcgctgtgcttgcaccattgtgtgcaatcatctacaactcgattgttgacctcttcggtggactgcagattcaactgcaagaagaagtagactaacctctgaaacacaaacccct

SEQ ID NO: 728 - protein, 103 aa, Corynebacterium glutamicum
SPLATFRVALAMSIIGLVAWIICVTVLYFGLNVAGVWQNFNDVIGGVGAEQTITFGLVLSISALLGAIGAITVAVLAPLCAIIYNSIVDLFGGLQIQLQEEVD

SEQ ID NO: 729 - DNA, 1023 bp, Corynebacterium glutamicum
  CDS (101)..(1000): RXN01694
cgacaccaataatttattgggtatccaccaattaccgctgtgagcactgcaaattacgtattcgaaaagccatgtccaccacgtgttctatcctggcggcatgcaaaaaatcaccccaaacatctggtgccaaggcaccgcagacgaagcagccgaattctacgtcaatgcgttttctgagtttccgggtggcgcagaagtactcaccacagttaagtatcccgaagctggcttgctggacttccaggagcctttcgcaggaaaaaccttgacggtggaactcgctatctcaggctttaagatcatcttgatcaatgctggtgaagagttcactcccaacccatcgatcagcttcatggtgaattttgatgcggtgcgtgatgaaaatgccaaagagcaccttgatgcggtgtgggaaaaactccatgaaggcggcagcacactgatgccagtcgatacttacccattttcggaatactacgggtgggtacaagacaaatatggtgtgagctggcaattgatgctcagccgcccagaagaaaagccaggtcccgcagtaatcccaacgctcttatttggtggggcagctcaaaatcaggcaggcccagctcaagaaaactacgttgaggtgttcccgaactcccaacttggtgatcgtgcaccttatggacagcaaacaggtcctgccactcctgaggccctcatgttttcccagttccaactcgacggtcagtggattttcgcgatggattccggagttgagcaagatttcaccttcagtgagggtgtctcattgatgtatgaagctcatggtcaagaagaactcgatgccatctggaatgcactctcggcagttccagaagctgaggcttgtggttggttgaaggacaagttcggcgtgagctggcagattgttcccgacaacatggaggagctcatggctaaacccggcgcgtatgaaaagcttcttgcgatgaagaagatcaatatcgcggagttctagcagttctaagcgctccacgc

SEQ ID NO: 730 - protein, 300 aa, Corynebacterium glutamicum
MQKITPNIWCQGTADEAAEFYVNAFSEFPGGAEVLTTVKYPEAGLLDFQEPFAGKTLTVELAISGFKIILINAGEEFTPNPSISFMVNFDAVRDENAKEHLDAVWEKLHEGGSTLMPVDTYPFSEYYGWVQDKYGVSWQLMLSRPEEKPGPAVIPTLLFGGAAQNQAGPAQENYVEVFPNSQLGDRAPYGQQTGPATPEALMFSQFQLDGQWIFAMDSGVEQDFTFSEGVSLMYEAHGQEELDAIWNALSAVPEAEACGWLKDKFGVSWQIVPDNMEELMAKPGAYEKLLAMKKINIAEF

SEQ ID NO: 731 - DNA, 1023 bp, Corynebacterium glutamicum; identical to SEQ ID NO: 729
  CDS (101)..(1000): FRXA01694

SEQ ID NO: 732 - protein, 300 aa, Corynebacterium glutamicum; identical to SEQ ID NO: 730

SEQ ID NO: 733 - DNA, 1302 bp, Corynebacterium glutamicum
  CDS (101)..(1279): RXN01696
aggtgacggtgatacaattttgccataactgacttaacccagaacgttgtccggaagcacacagacctttgtgcggcttccttttctaggagcatgtaacttgtctaccccaatcggccttggccttcctccgaccccacctccagtgttggcgccacgtcgtaaaacacgccaactcatggtcggcaaagtgggcgttggttcggatcacccgatttccgtccagtcgatgaccaccaccaaaacccacgacatcaacggcaccctgcaacagatcgcacagttgacagccaccggttgtgacatcgtccgcgttgcctgcccaaagactgttgatgcggaagcactgccgatcatcgcaaagaagtctccgatcccagtgatcgcagatatccacttccagcccaagtacatcttcgcggcaatcgatgcaggttgcgccgccgttcgtgtgaacccaggcaacatcaaggaattcgatggtcgcgttaaagaagtagcaaaagctgcaggcgatgccggaattccaattcgtattggtgtcaacggcggatccctggataagcgcatcctggacaaataccacggcaaagccaccccagaagctctcgtggaatccgcaatgtgggaagccggcctgtttgaagagcacggcttcggcgacatcgcaatctctgtgaagcactccgacccagtactcatggtggaggcctaccgccagctcgctgaacaaagcgactacccactgcacctcggtgttactgaagctggtcccaagttcatgggaacaatcaagtcttccgtagcattcggcgctctgctgtcccagggcatcggcgacactatccgtgtgtctctttctgctgacccagtggaagaaatcaaggttggcgaccagattctgcagtccctcaacctgcgcccacgcaagctggaaatcgtgtcctgcccatcatgtggccgcgcacaggtcgatgtgtactcacttgctgaagaagtcaccgaagcactcgacggcatggaagttccactgcgcgtcgctgtcatgggttgcgttgttaacggcccaggtgaggctcgcgacgctgacctcggtgttgcatccggtaacggcaagggccagatctttgtcaagggcgaagtcatcaagactgtcccagaatcccagatcgtggaaaccctcatcgaagaagcaatgcgtatcgcagaggaaatggacccagaagtcctcgctgcagcaagtgcttccggtatgaaggctgaagtgaaggtaaccaagtaagttttggttaattaaggcac

SEQ ID NO: 734 - protein, 393 aa, Corynebacterium glutamicum
LSTPIGLGLPPTPPPVLAPRRKTRQLMVGKVGVGSDHPISVQSMTTTKTHDINGTLQQIAQLTATGCDIVRVACPKTVDAEALPIIAKKSPIPVIADIHFQPKYIFAAIDAGCAAVRVNPGNIKEFDGRVKEVAKAAGDAGIPIRIGVNGGSLDKRILDKYHGKATPEALVESAMWEAGLFEEHGFGDIAISVKHSDPVLMVEAYRQLAEQSDYPLHLGVTEAGPKFMGTIKSSVAFGALLSQGIGDTIRVSLSADPVEEIKVGDQILQSLNLRPRKLEIVSCPSCGRAQVDVYSLAEEVTEALDGMEVPLRVAVMGCVVNGPGEARDADLGVASGNGKGQIFVKGEVIKTVPESQIVETLIEEAMRIAEEMDPEVLAAASASGMKAEVKVTK

SEQ ID NO: 735 - DNA, 620 bp, Corynebacterium glutamicum
  CDS (1)..(597): FRXA01696
cactccgacccagtactcatggtggaggcctaccgccagctcgctgaacaaagcgactacccactgcacctcggtgttactgaagctggtcccaagttcatgggaacaatcaagtcttccgtagcattcggcgctctgctgtcccagggcatcggcgacactatccgtgtgtctctttctgctgacccagtggaagaaatcaaggttggcgaccagattctgcagtccctcaacctgcgcccacgcaagctggaaatcgtgtcctgcccatcatgtggccgcgcacaggtcgatgtgtactcacttgctgaagaagtcaccgaagcactcgacggcatggaagttccactgcgcgtcgctgtcatgggttgcgttgttaacggcccaggtgaggctcgcgacgctgacctcggtgttgcatccggtaacggcaagggccagatctttgtcaagggcgaagtcatcaagactgtcccagaatcccagatcgtggaaaccctcatcgaagaagcaatgcgtatcgcagaggaaatggacccagaagtcctcgctgcagcaagtgcttccggtatgaaggctgaagtgaaggtaaccaagtaagttttggttaattaaggcac

SEQ ID NO: 736 - protein, 199 aa, Corynebacterium glutamicum
HSDPVLMVEAYRQLAEQSDYPLHLGVTEAGPKFMGTIKSSVAFGALLSQGIGDTIRVSLSADPVEEIKVGDQILQSLNLRPRKLEIVSCPSCGRAQVDVYSLAEEVTEALDGMEVPLRVAVMGCVVNGPGEARDADLGVASGNGKGQIFVKGEVIKTVPESQIVETLIEEAMRIAEEMDPEVLAAASASGMKAEVKVTK

SEQ ID NO: 737 - DNA, 1080 bp, Corynebacterium glutamicum
  CDS (101)..(1057): RXN01697
tagatcaactaagtatgaacgcgaatccgactttggtcgtactgcaagaatcgaccagagcccgattaaaaaatgcccccgcgcaacgaaactagtaatcatgtttcaaggactaaaagaactcaccgcagcaaaaggccgcacgctgctgatcaccgtcaccgtcgggctgatcgccgtgctggttactttcctctctgccctcaccgccgggcttggccaccaatcagtatccgcactgaaatacctagcgggtgataatgaacttatcctcgccgattccggatccaccacgctttccgcgtccacgctttctgatcaagcagttgcccaactcgaagacgaaggcgcacagatgctgtggcaggtccgcgaccgagtagcagacacccccaccatgctcctcaactcccctgaccttgcgcctggtgaagtatcccttcctgccgaactcgctgattcggaactcgctactgcgcatgatgtagtggattcttccaacgatctgtacctcgatcacctgcccgtggtattgatgaacacctccgatttagcctcactcgcgcaagtccgaggcgtgacaggaccagcaggcgcattcgcctctgacgttgcgctcccctccgacaccgttgcgctctctggatccgaacggtggaacgcatccgcctcctaccagggcgaacagatgtcactcaacctcatgatcgtcatgctgtatgttatctccgcactcgtgctcggcgcattcttcaccgtctggaccatccaacgcctccgcggcatcgccatctctagtgctttgggagcagcccgccgagtacttatcgccgacgctctcggccaagccatcatcgtcttaggaatcggcatcaccgcaggcacattgatcacagtcatctccgcattcggcatgggagacgcaatgcccgtggtcatctcctcctccaccacgctcttccccgcacttatcctcgccgcagcaggactcatcggtgccgccatttcactcggccccatccttcgcgtcgaaccacgctccgcactcatgaacgcataagaaaaggaacctcacatgac

SEQ ID NO: 738 - protein, 319 aa, Corynebacterium glutamicum
MFQGLKELTAAKGRTLLITVTVGLIAVLVTFLSALTAGLGHQSVSALKYLAGDNELILADSGSTTLSASTLSDQAVAQLEDEGAQMLWQVRDRVADTPTMLLNSPDLAPGEVSLPAELADSELATAHDVVDSSNDLYLDHLPVVLMNTSDLASLAQVRGVTGPAGAFASDVALPSDTVALSGSERWNASASYQGEQMSLNLMIVMLYVISALVLGAFFTVWTIQRLRGIAISSALGAARRVLIADALGQAIIVLGIGITAGTLITVISAFGMGDAMPVVISSSTTLFPALILAAAGLIGAAISLGPILRVEPRSALMNA

SEQ ID NO: 739 - DNA, 826 bp, Corynebacterium glutamicum
  CDS (101)..(826): FRXA01697
tagatcaactaagtatgaacgcgaatccgactttggtcgtactgcaagaatcgaccagagcccgattaaaaaatgcccccgcgcaacgaaactagtaatcatgtttcaaggactaaaagaactcaccgcagcaaaaggccgcacgctgctgatcaccgtcaccgtcgggctgatcgccgtgctggttactttcctctctgccctcaccgccgggcttggccaccaatcagtatccgcactgaaatacctagcgggtgataatgaacttatcctcgccgattccggatccaccacgctttccgcgtccacgctttctgatcaagcagttgcccaactcgaagacgaaggcgcacagatgctgtggcaggtccgcgaccgagtagcagacacccccaccatgctcctcaactcccctgaccttgcgcctggtgaagtatcccttcctgccgaactcgctgattcggaactcgctactgcgcatgatgtagtggattcttccaacgatctgtacctcgatcacctgcccgtggtattgatgaacacctccgatttagcctcactcgcgcaagtccgaggcgtgacaggaccagcaggcgcattcgcctctgacgttgcgctcccctccgacaccgttgcgctctctggatccgaacggtggaacgcatccgcctcctaccagggcgaacagatgtcactcaacctcatgatcgtcatgctgtatgtcatctccgcactcgtgctcggcgcattcttcaccgtctggaccatccaacgcctccgcggcatcgccatctctagtgctttgggagcagcccgccgagtactt

SEQ ID NO: 740 - protein, 242 aa, Corynebacterium glutamicum
MFQGLKELTAAKGRTLLITVTVGLIAVLVTFLSALTAGLGHQSVSALKYLAGDNELILADSGSTTLSASTLSDQAVAQLEDEGAQMLWQVRDRVADTPTMLLNSPDLAPGEVSLPAELADSELATAHDVVDSSNDLYLDHLPVVLMNTSDLASLAQVRGVTGPAGAFASDVALPSDTVALSGSERWNASASYQGEQMSLNLMIVMLYVISALVLGAFFTVWTIQRLRGIAISSALGAARRVL

SEQ ID NO: 741 - DNA, 472 bp, Corynebacterium glutamicum
  CDS (101)..(472): RXN01701
gccgatcaaattcattgattgttaatcggaagttttttgaacaggtaaagctaggggacctgttcagtgcctgttggcggatgtattaaggagaatgcccatgctgagccacgaagaaattgttgcgatcgcagaagatttgctgtctaaacgctacggcggtgtacaaactctttctgacgtggagcagctcaacggttccggcacctccgcggtgctgcgtgccagggtggctaactccccattcctccaacagcgctccgtggtgctgaagtacgtgcccagcaccggagacgtctttgatgattctgcgctggtgcgtgaaatcgtctcctaccagttcaccacctccttgtcggaagatgtccgcccagggccagtcattttggcctatgacattgacaagcgcatcctggtcatttcagattccggcaacggcgacacctttgcggatctgatcgatcagcgtccg

SEQ ID NO: 742 - protein, 124 aa, Corynebacterium glutamicum
MLSHEEIVAIAEDLLSKRYGGVQTLSDVEQLNGSGTSAVLRARVANSPFLQQRSVVLKYVPSTGDVFDDSALVREIVSYQFTTSLSEDVRPGPVILAYDIDKRILVISDSGNGDTFADLIDQRP

SEQ ID NO: 743 - DNA, 433 bp, Corynebacterium glutamicum
  CDS (101)..(433): FRXA01701
gccgatcaaattcattgattgttaatcggaagttttttgaacaggtaaagctaggggacctgttcagtgcctgttggcggatgtattaaggagaatgcccatgctgagccacgaagaaattgttgcgatcgcagaagatttgctgtctaaacgctacggcggtgtacaaactctttctgacgtggagcagctcaacggttccggcacctccgcggtgctgcgtgccagggtggctaactccccattcctccaacagcgctccgtggtgctgaagtacgtgcccagcaccggagacgtctttgatgattctgcgctggtgcgtgaaatcgtctcctaccagttcaccacctccttgtcggaagatgtccgcccagggccagtcattttggcctatgacattgacaagcgcatcctggtcatttcagattccggc

SEQ ID NO: 744 - protein, 111 aa, Corynebacterium glutamicum
MLSHEEIVAIAEDLLSKRYGGVQTLSDVEQLNGSGTSAVLRARVANSPFLQQRSVVLKYVPSTGDVFDDSALVREIVSYQFTTSLSEDVRPGPVILAYDIDKRILVISDSG

SEQ ID NO: 745 - DNA, 1236 bp, Corynebacterium glutamicum
  CDS (101)..(1213): RXN01703
gttagacaaatgggtaaacagagctgacctagcggaatccgccatcaacgaaaggcattccgcgagggtttggggtctgcctcgaacaaatcttgggtttgtggcatggccatccaacgccaaagaaaaactgtttatccactggcactactggtggcaagcgcattatctagactgcctggtggatgctgctcgtcgacgcaccacaaaggcccgtcgcgaccgcatcagggacaccatccgcggcatttcggtgcgcaatgtgggcaagctgacctcgaatcgttattacgacgacaaagcttggctggcccttgctcttgggcgtgccggaaaagtgcgaaaggtgcgcacaccaaaatcattgccctcgttggaacaaaacatcgtcgatggcattgattcccttactggtgtgctgccgtggcgttccggcgaaaccttctacaacgttccctccaacggtcctgctgcgatcatgatggcccgcaccgaccgtttggacgaggctatgaaaatcaccgattggatttttgacaacctgatcgatggcgacggccttgtgatggacggattgcgcatgcgcatgcacggacctgagcttgtccgttccatccacccgtattgccaaggtgtcgccattggtgcgtgtttggaaattgctctcaaactgcgtgagcgcgcaggcttgaccactactgtggtggatcactggtcggatgccgataaggcagaagactccctcaaatactttgcacacatccacgctgtggttcaggctgtgtcgcggaagatgaccaacttccacggcgttattgattgggacaccggtgacggcgacggcggtttgttcaagggcattttggtccgctatttagctgatgtggccatccgcctgcctgacgattcaccaaccaaccgggaaaccaaaaagattgcagcacgcctggtactggaatcggcggaaagcgtatggaaccaccgattggaagttgatggccttccggtattcgccacagactggacaacggatgcacgcctgccacaaaactttggtttgagttcctctagtttgagcgatctggtgagtgttgtgcgcgtggatgaacgtgatctgtccgtgcaattgtccggttggatgctcatggaagcagcagcgaaagtggccgaagaactggaaaacaacggcaatagttacaccggtcgctcccgatagccccgatagtgtatgtgctg

SEQ ID NO: 746 - protein, 371 aa, Corynebacterium glutamicum
VAWPSNAKEKLFIHWHYWWQAHYLDCLVDAARRRTTKARRDRIRDTIRGISVRNVGKLTSNRYYDDKAWLALALGRAGKVRKVRTPKSLPSLEQNIVDGIDSLTGVLPWRSGETFYNVPSNGPAAIMMARTDRLDEAMKITDWIFDNLIDGDGLVMDGLRMRMHGPELVRSIHPYCQGVAIGACLEIALKLRERAGLTTTVVDHWSDADKAEDSLKYFAHIHAVVQAVSRKMTNFHGVIDWDTGDGDGGLFKGILVRYLADVAIRLPDDSPTNRETKKIAARLVLESAESVWNHRLEVDGLPVFATDWTTDARLPQNFGLSSSSLSDLVSVVRVDERDLSVQLSGWMLMEAAAKVAEELENNGNSYTGRSR

SEQ ID NO: 747 - DNA, 494 bp, Corynebacterium glutamicum
  CDS (1)..(471): FRXA01703
ctcaaatactttgcacacatccacgctgtggttcaggctgtgtcgcggaagatgaccaacttccacggcgttattgattgggacaccggtgacggcgacggcggtttgttcaagggcattttggtccgctatttagctgatgtggccatccgcctgcctgacgattcaccaaccaaccgggaaaccaaaaagattgcagcacgcctggtactggaatcggcggaaagcgtatggaaccaccgattggaagttgatggccttccggtattcgccacagactggacaacggatgcacgcctgccacaaaactttggtttgagttcctctagtttgagcgatctggtgagtgttgtgcgcgtggatgaacgtgatctgtccgtgcaattgtccggttggatgctcatggaagcagcagcgaaagtggccgaagaactggaaaacaacggcaatagttacaccggtcgctcccgatagccccgatagtgtatgtgctg

SEQ ID NO: 748 - protein, 157 aa, Corynebacterium glutamicum
LKYFAHIHAVVQAVSRKMTNFHGVIDWDTGDGDGGLFKGILVRYLADVAIRLPDDSPTNRETKKIAARLVLESAESVWNHRLEVDGLPVFATDWTTDARLPQNFGLSSSSLSDLVSVVRVDERDLSVQLSGWMLMEAAAKVAEELENNGNSYTGRSR

SEQ ID NO: 749 - DNA, 555 bp, Corynebacterium glutamicum
  CDS (101)..(532): RXN01709
gcaagtggaaccacgatgggaacggtaactgctgccgctgcggtattactcgtagtttcagaaattaggtgtcgatgcagcaatacggaactttgccaatgtgtttgaacaagctctcgggctcaccacccttgcacaaacagctggagcgggcgcagcggggggcttgggtttcatggcaatggcgttgttgtctgcagggatgcgctccggcgtggacatgattcttaatgaaaccgggggtgaaaagatgcttgcacaggcagatttagtcatcactggagaaggacgcattgatgcacagaccctcagcgggaaagctcctactggaatcgccaaacgggcacgtgcgaaaggaattccagtactggcggtttgtgggcagagcctattgggtccagcaatctcaaatgagctatttgaagacatctacagctttaccgatttcgaatctgacatcaatgaatgcattcgaaacccgctcccaattttggaaggtatcggttttaacatcgccaaacatcatctgagttagcgatatttcagcaaaccgat

SEQ ID NO: 750 - protein, 144 aa, Corynebacterium glutamicum
VFEQALGLTTLAQTAGAGAAGGLGFMAMALLSAGMRSGVDMILNETGGEKMLAQADLVITGEGRIDAQTLSGKAPTGIAKRARAKGIPVLAVCGQSLLGPAISNELFEDIYSFTDFESDINECIRNPLPILEGIGFNIAKHHLS

SEQ ID NO: 751 - DNA, 368 bp, Corynebacterium glutamicum
  CDS (16)..(345): FRXA01709
ttgttgtctgcagggatgcgctccggcgtggacatgattcttaatgaaaccgggggtgaaaagatgcttgcacaggcagatttagtcatcactggagaaggacgcattgatgcacagaccctcagcgggaaagctcctactggaatcgccaaacgggcacgtgcgaaaggaattccagtactggcggtttgtgggcagagcctattgggtccagcaatctcaaatgagctatttgaagacatctacagctttaccgatttcgaatctgacatcaatgaatgcattcgaaacccgctcccaattttggaaggtatcggttttaacatcgccaaacatcatctgagttagcgatatttcagcaaaccgat

SEQ ID NO: 752 - protein, 110 aa, Corynebacterium glutamicum
MRSGVDMILNETGGEKMLAQADLVITGEGRIDAQTLSGKAPTGIAKRARAKGIPVLAVCGQSLLGPAISNELFEDIYSFTDFESDINECIRNPLPILEGIGFNIAKHHLS

SEQ ID NO: 753 - DNA, 1281 bp, Corynebacterium glutamicum
  CDS (101)..(1258): RXN01711
tctcgtgagtttctccccggtagcaccttctatatcagcccccacgccgcgtcggagcaggtgggatagcatcggcaacgcggttgcatggccgttggccatgttgttgatggcgcatcgcttcttcgtgcttgcgattaacggcgcagtcaccgacgatttcacgacggtttatagtgctttacgacgtttcgttgaaggtattccggtctacaacgaggtctaccacttcgtcgatccgcactacctctataacccgggcgccaccctcctattggcaccattgggatatatcacccatttcacgttggctcggtggatgttcatcgcggtgaacctccttgccattgttttagcgttcgggctgctgaccagactctccggttgggcgctgcgcagcatggtgtggccgattgcgatcgccttggcgatgctgacagaaaccgtgcaaaacaccctcattttctccaacatcaacggcatcctgctgctcatgttggcgattttcctgtggtgcgtggtgcacaaaaaatcctggttgggcggactagtcattggtttggccattttgatcaaacccatgttcctgccacttctcttcctacctttggtgaaaaagcaatggggatcgctcatcctcggcattttaaccccagtgattttcaatgcagtggcctggttcttagttccgggagcatctgaatacgtcacccgcacgatgccctaccttggtgaaactcgagattttgccaacagctcactcccaggcttggccatctatttcggaatgcccacctggatggaaatcacctggttcctcatcttcggcgcaatggtcggcctcgcagtgctggcactcctgagattccgtaacaccgagccatacttctgggcagcaaccaccaccggtgtactcctgactggcgtattcttcctgtcctcactgggacagatgtactactccatgatgatcttccctatgatcttcaccctgctcggaagccgatccgtattccacaactgggttgcctgggtcgccgcctacttcttactatcccctgacactttcacctcccagcgactacccgatgtagcccgctggatggaatttttcagcgcgaccgttggttggggactattgatagtggttacatttgtctcggcgctaatctggtttattggtgatatccgagccaagggaactccgagctcacccattaccactgatccaacgcacgaccatcttgagaggacagcatgacagacttcaaactcatcagc

SEQ ID NO: 754 - protein, 386 aa, Corynebacterium glutamicum
MLLMAHRFFVLAINGAVTDDFTTVYSALRRFVEGIPVYNEVYHFVDPHYLYNPGATLLLAPLGYITHFTLARWMFIAVNLLAIVLAFGLLTRLSGWALRSMVWPIAIALAMLTETVQNTLIFSNINGILLLMLAIFLWCVVHKKSWLGGLVIGLAILIKPMFLPLLFLPLVKKQWGSLILGILTPVIFNAVAWFLVPGASEYVTRTMPYLGETRDFANSSLPGLAIYFGMPTWMEITWFLIFGAMVGLAVLALLRFRNTEPYFWAATTTGVLLTGVFFLSSLGQMYYSMMIFPMIFTLLGSRSVFHNWVAWVAAYFLLSPDTFTSQRLPDVARWMEFFSATVGWGLLIVVTFVSALIWFIGDIRAKGTPSSPITTDPTHDHLERTA

SEQ ID NO: 755 - DNA, 1281 bp, Corynebacterium glutamicum; identical to SEQ ID NO: 753
  CDS (101)..(1258): FRXA01711

SEQ ID NO: 756 - protein, 386 aa, Corynebacterium glutamicum; identical to SEQ ID NO: 754

SEQ ID NO: 757 - DNA, 1123 bp, Corynebacterium glutamicum
  CDS (101)..(1123): RXN01721
ttcgccaacgccgccccgaaatgatcgggagggggcgtcgaaaagcacttctgcgagcatcaaacatgatgcgtacctgccacccgcagacggcaatcgcgtgcttgtggacagattcggacgcatcgcgcgtgacctgcgggtgtcactgaccgaccgatgcaacctccgctgcacctattgcatgcccgcggagggtttagagtggctgcccaccgagcagacgcttaacgacgccgaggtgctgcgactcatccgcattgcggtggttaagctgggcattcgtcaaattcgattcaccggcggcgagcctttactgcggaaaaatttggaagacatcatcgccggcaccgcagccctgcgcaccgacgaaggcgaaaaagttcacatcgctctcaccaccaacggccttggcctagacaaacgcatcgcaggactgaaagaagctggtcttgaccgggtcaatatttcactcgacaccatcgacgccgaacgctacgtctcgctaaccaagcgtgatcgattgtccggtgtgttggcgtccatcgatgccgctgttgccgctggccttcacccagtgaagatcaacgccgtggtcatgcctggggtcaatgaagtagatatcgtcccccttgcggaatactgcatttccaaaggctcccaactgcgattcatcgaacaaatgccacttggcccgcgcgagcagtggaaacgcggcgatatggtcacagccgaagaaatcctggcgcgcctggaagaaaaattcaccttatcccccgccaaggaaccccgaggagctgcacctgctgcgctgtggaatgtggtagataaatccaaccctgatatcactggacaaatcggcatcatcgcctcggtgacgcacccattttgcggagattgcgatcgctcccgcctcaccaccgacggcaccatccgaaactgccttttctcccgcactgaaactcccctacgtgacgcgcttcgcgacggcgcctccgacgatgagctcgcgcaactgtgggcaggcgccatgtgggagaagaaacccggccatggcatcgacgatgaaggcttcctccaaccagatcgccccatgtctgccatcggggctagcccataccag

SEQ ID NO: 758 - protein, 341 aa, Corynebacterium glutamicum
VLVDRFGRIARDLRVSLTDRCNLRCTYCMPAEGLEWLPTEQTLNDAEVLRLIRIAVVKLGIRQIRFTGGEPLLRKNLEDIIAGTAALRTDEGEKVHIALTTNGLGLDKRIAGLKEAGLDRVNISLDTIDAERYVSLTKRDRLSGVLASIDAAVAAGLHPVKINAVVMPGVNEVDIVPLAEYCISKGSQLRFIEQMPLGPREQWKRGDMVTAEEILARLEEKFTLSPAKEPRGAAPAALWNVVDKSNPDITGQIGIIASVTHPFCGDCDRSRLTTDGTIRNCLFSRTETPLRDALRDGASDDELAQLWAGAMWEKKPGHGIDDEGFLQPDRPMSAIGASPYQ

SEQ ID NO: 759 - DNA, 657 bp, Corynebacterium glutamicum
  CDS (101)..(634): RXN01734
acgatctgccggagaatctcaagaaagtgctcactgcgcagcacaccgtcaccgtccaagacaccggcaccgggcggatttcactcctggatgtgcaaccatgacagatccaattgagcaggcatttgaacgcatccgcgccgaagccatgcgcagaaatggatccgttcccgacctcaataaaaacgatgcttttcgacgcccacctgcgccgaaagggggcgtcgaaaagcgcaaaaaaggccgtgcaagcggcctagacggccgccagaaacgatatgtgcgcggcgcggagtcgctgggatcggtgctgaacaaggaaattcagcgtcgtggctggggcaaagacattgccggcggttgggtgacgtccaactgggaagagcttgttggcgcgaagattgcgcagcatacgcgcgtggaaatgatcaaagataagaagctttttatcacttgtgattccacagcgtgggccaccaatctgcgcatgatgcagcggcaaatcctgcaggtaatcgctgaaaaagtgggtccaaatattattacagagctgcgtatttttgggcctcaggccccaagctggcgcaaggggccgttgcacgtaaaaggacgcggtccgagagacacatacggatagtttggtgataaaaaccgtcg

SEQ ID NO: 760 - protein, 178 aa, Corynebacterium glutamicum
MTDPIEQAFERIRAEAMRRNGSVPDLNKNDAFRRPPAPKGGVEKRKKGRASGLDGRQKRYVRGAESLGSVLNKEIQRRGWGKDIAGGWVTSNWEELVGAKIAQHTRVEMIKDKKLFITCDSTAWATNLRMMQRQILQVIAEKVGPNIITELRIFGPQAPSWRKGPLHVKGRGPRDTYG

SEQ ID NO: 761 - DNA, 657 bp, Corynebacterium glutamicum; identical to SEQ ID NO: 759
  CDS (101)..(634): FRXA01734

SEQ ID NO: 762 - protein, 178 aa, Corynebacterium glutamicum; identical to SEQ ID NO: 760

SEQ ID NO: 763 - DNA, 627 bp, Corynebacterium glutamicum
  CDS (101)..(604): RXN01742
tggctaaagcgatgtgtgtcatctgaaaaatttcccccaaaacttaatcgacacagttacttcatctggccttatttcatcacagttacaatcatctgtcatgcaggaaaagccagagatgccagcgattgaggtcatccgttcagcgaaacgcaccaaaactgttcaagctcgaattgtggacgggcaaatccaggtgcgcatccctgcgaggatgtctaaagcggaggaagaaaaagcggtgggggagatcgtcgcaaagctaaagcgacgcacccaatcggccgtctcaagcgacgctgacctgattgagcgcgcccataagttgaacaagactgtgttggaggggcgggcgcgggtggaaagtattcggtgggtgagtaatcagaaggggcggtgggggtcgtgcacggtggcgactgcggagattcggatttcggatcgtttaaagcacgtgccggattatgtgttggatgcggtgttggtgcatgagctgacgcatacgtttattgcggggcattcggcggagttttgggagtgggcagacaaaacgcccctggcagagagggccaagggctatttggaggcgtatcagcggtggggctgaaggtttagttcttgtcggag

SEQ ID NO: 764 - protein, 168 aa, Corynebacterium glutamicum
MQEKPEMPAIEVIRSAKRTKTVQARIVDGQIQVRIPARMSKAEEEKAVGEIVAKLKRRTQSAVSSDADLIERAHKLNKTVLEGRARVESIRWVSNQKGRWGSCTVATAEIRISDRLKHVPDYVLDAVLVHELTHTFIAGHSAEFWEWADKTPLAERAKGYLEAYQRWG

SEQ ID NO: 765 - DNA, 627 bp, Corynebacterium glutamicum; identical to SEQ ID NO: 763
  CDS (101)..(604): FRXA01742

SEQ ID NO: 766 - protein, 168 aa, Corynebacterium glutamicum; identical to SEQ ID NO: 764

SEQ ID NO: 767 - DNA, 2064 bp, Corynebacterium glutamicum
  CDS (101)..(2041): RXN01754
tgtggctgaagacaagaatgaatagcattcatctcgtcgaatttcatgtagaaatttgtcccccttttttttgatgtgaaagttgaatcggtaagctcctgtgaaaattaaatccgtatttttgagcaccgctttaagcgcttccttactgctcggaatcaccccacccgtgctgggagcaacgatcaaccccagtttgcctctttctgcgttgagctcctcggacgatatcgccgtacccaacttcgccaaagaattaccgttagcttttgatgtaccagcaggcactgttccccaaagcttgagtggaacgctgcagattcctgccgagttttctggcggcgtcgtggagttttatgacggtgaccggctctttcacaccctgcgcctagaagttaatgattcccgagcacacattgaggttccgctgcaaagcgttcctgtcgaagacggccgcgccaccttttggttgcgcgccatgttggatcctgtaaacaaccagtggtgctacgaggagcaggaagtccgcttcttagacggaaacgtcacctttgaaggggcgacgattaacccagctgtggtggctgattacttcccgtcagtgctgcgcgcgttgacaatttacgtcccggaaaacccctctgaggcagtacaagaagccacgttagaggttgcgacctccctggattcggtgtaccgaagatcaggtctggatgtcaacgtagaaacgcttccaaccggcaccgatgctcctcctacacgtcctcaagattttgaacgccagattgtgctggttgacgaggcaacagaaagtaacacgcaaaaaaccgaattggtcaatcccggccaagacaatgcattcttgcgcctgaacggcaacgccgacgagctttacgatcaagcgcgcttgcttaccgacgcaaccctgccacttgccgtagacaccgaagtaacggcctcaggttttggtgatgtgcccaacctttctacagatgtggccaccctccaagaactgggtatcacgcagctcacctctgaatcagttgcgcgcacaagcgtcaccttgggcattgaacgctcccgcctgcggacctactcgcagtccatggacctgcacataacgggaacctacaccccattgccaccccaaaatgcaggacagatcacgttctccattggtgacaccgtgttggactccttgaccaccgatgacactggcatcattgaccgtgagttcaacgttcctggagacttggtcaaccgctacacggcgatcgtcgtggaattcaccagcaccggcgacgttaattgtggggtcacccagcccgtaggcctcaacattgattccgacagccttgtcacctcccaacattcagatgttcctgtactcaacggcttccggtccctaccgcagtccttccaacctcgtgtggacgtggcgtttgctgatcccagcgtgcaggaactctcccgcgctgtcagcgtagtgttgggaattcaatctatgagctcccagcgcatccgcccacacctggttaactgggatgaagccgtagccagcgagcgcccaacaattttcattgatgctgcgggcgcaaagactgatcaagtgccaagctacctcgcccaacaaggccaaaccctagagatcaccagcaagaacgaccaaaatgcggacggcgaacaactcacccgatccctgcaaaccaacgctgcgcttgttgtcggttccattcaggccgtgtgggatgccgataagaagcgcacggtgattgtggcaagttcccaggacaacccccccgatttggatgccttgatttcgtggatgggagaagaccgcgaacgctggagtgatctcaacggcgacctgattgtcaaagtccgagaccgcgaacctgtgcaattgaccaccgtggaagccccagatcagcctggtcgatcggccacagcctttattgcgatcggcgtcagccttgtggtcattgccctgattgtcgcagccgtggtgtcagtgtccaggcgttcgcaaaaaggatacaaatgatttcttctttacccagtaga

SEQ ID NO: 768 - protein, 647 aa, Corynebacterium glutamicum
VKIKSVFLSTALSASLLLGITPPVLGATINPSLPLSALSSSDDIAVPNFAKELPLAFDVPAGTVPQSLSGTLQIPAEFSGGVVEFYDGDRLFHTLRLEVNDSRAHIEVPLQSVPVEDGRATFWLRAMLDPVNNQWCYEEQEVRFLDGNVTFEGATINPAVVADYFPSVLRALTIYVPENPSEAVQEATLEVATSLDSVYRRSGLDVNVETLPTGTDAPPTRPQDFERQIVLVDEATESNTQKTELVNPGQDNAFLRLNGNADELYDQARLLTDATLPLAVDTEVTASGFGDVPNLSTDVATLQELGITQLTSESVARTSVTLGIERSRLRTYSQSMDLHITGTYTPLPPQNAGQITFSIGDTVLDSLTTDDTGIIDREFNVPGDLVNRYTAIVVEFTSTGDVNCGVTQPVGLNIDSDSLVTSQHSDVPVLNGFRSLPQSFQPRVDVAFADPSVQELSRAVSVVLGIQSMSSQRIRPHLVNWDEAVASERPTIFIDAAGAKTDQVPSYLAQQGQTLEITSKNDQNADGEQLTRSLQTNAALVVGSIQAVWDADKKRTVIVASSQDNPPDLDALISWMGEDRERWSDLNGDLIVKVRDREPVQLTTVEAPDQPGRSATAFIAIGVSLVVIALIVAAVVSVSRRSQKGYK

SEQ ID NO: 769 - DNA, 2064 bp, Corynebacterium glutamicum; identical to SEQ ID NO: 767
  CDS (101)..(2041): FRXA01754

SEQ ID NO: 770 - protein, 647 aa, Corynebacterium glutamicum; identical to SEQ ID NO: 768

SEQ ID NO: 771 - DNA, 4587 bp, Corynebacterium glutamicum
  CDS (101)..(4564): RXN01761
ttaaagtttctatattccattctaaaataactttgaattggggattaatgaaactttttaagcaattgtttaaaacgaatattgagggggtggcgggcaagtgactgcgacagttttagaaccgcaacctgtacagcttagtgagcaggacgtagatgctgagattgcgcgcatggagcttaaacacaaccgacacaagacgtggcgacgccgaacgatggctgttgtcatgacgctcttgatctcagtgggtttgagctttggtgcgtttggtaacaaggaacgtgaagctaatgctttcgccagcgctattattgcccaggttgtcggtgctatgggcgaggttgcctttgaagcgatttgtcccagtgatggtgacaccgagatgcttcttaagtgcatcaccgagaacttaggtgaaatgcacattatcgagaagtgtctcgaagcagaagatgtcttgaagtgcttctacgatgcgaaaaacgaagagcaacgtaaagaacagaaccttgataaagcccctgattactccatgtaccgtatggcctctgcgatggcatcgttctatggcaatggtcgggcagctactgccggtgtagaggaaggcggaccgaacgagttcctcgattctgaggacgccggtcttaaggtgtgggagggcattctcagtaaggccgccaacggaggcaatgtccttggttatgctgacgcgaaacacaacgaggactctggttggttctttggtaatggtgttgccaacaacgagaaaacgtactcctatgattctctagctgatcatgcctttcaagggccttatcactttgcattatttggcgcgacactgagtggcttaggctttgatagctcaaaggcggaggattcgcagactgattttgctcagcgtaagggcatggggtacgcgatgatgatcgcgtacatcatctccggaggcattgatctggtttttaacactgtgctgaatatcttgagcaccataaacccatttagactgctcgttggaccagtatctcagaatactaacaagacattcactgagaatatggctggtgggcagaccacagaaggaacaccgtttgaaggaatgactgatttcttcgggttgatctataactggtcagtgactgtgggctggctcatcggtattcctgtctccattggtctgtttatgatgggtgcgttgatgtttcgacgcatggacaagggatcagcgtttaaaaaggttgttatccgcgtcgtgtacggtgtcgttggcctgccactgcttggtgtctcttataccggtgcgctggattccttcctcgacagcggtagttccacaagtgctggatcaaatgcgacaaagattgtgttgtccacctacgtggatttccaatcatgggcagaaaacacccgtatgcgtgttcctgacaaagtaacactggcgtggagtctggaggatcaggcgccaacagggcagtccatgcggatggtacgcaattcggcgttggaaattaatgctcaatcaaatgagagttttactacttttaagaatccaggttccatggatctaggctatagcatggactggatggaaaagatggcggatccagccaattctggcaccgatgggacctcatcaagttcggcgacgactattttccagggaaccatcgcgctactgagtcgttatatcgacaacgacagtatctcctctggcagtttcgaaacctctattcgaagtgcgatggaatctttgacctcgaaagagggaagtggcgaagctgttgccggtggtgatgtaatggcctgggttactggttacaacacagcctctggtcttaatgagatcactgctgctgaattagctgatgcgaacaatccattgcttgaggtcagcgactcagctggtctgcagggacgacctattgaccgcaatgcggtgtcatttaaatctggtgatgcgacagcgtcatgcaacaactcagtcgtgacaggttctcgtgctgtggtcggggactaccgaagtgactgcaatatgtcgcccttgacgatgtacaacttcctcaacacctcattccatccagctgatgcaagtgtcttttctacgtccacttctgcgtcaagctacacccgtgcatcgcatagcgcagtgagtcttatcggttctggtgccatgaactttgtgtactggttctctgcaatgtccctgatgggtagcttcatcgtgatcggtatcggttacgccggtgccatgctgtttaatacgattcgacgcacgctgtcgctcattggtgccgttccttttgctgcgatgggctttattgctggtgttgccaaggtcattgtgtacaccatcgctatgctcgtagaggttatcggaacgatcattttgtaccagctcattacccggttcttgatggctgtaccagcactctttgaacaacctttggctgattccttaagtagtaacgagagtgctgagctggttgccggtgctggtatggggctagtcggtatggcactagctacctcaggcaactgggcgattgccggcatggtgatcacagtggcctcatccatgggggtcatcatcttcacgattattgcgatgaaggtgcgcggatctttggtatcaggtgtcgatgaaaccgtgaccagtgttattaaccgcttcttggatacacaggtctcttctgcaggtgctacctctggtgacggcatgatgcgtcgtgcagccgcaacgggtcttggtattggtgcgacacatatggtactcaaccgtgatggtgacggtggtggatctgattcaggctctggtggatcaggtggcggtagcgattcaggcttgggtgagaaggctgctggtctggcgaaggttgtcacaactgtggctggtgccggattagtcggtaagtatgctacggatgcgctcgataattatgcagatggcgttatcaacggcgacggtgatggtgcgttcgcagcaggtggtgacgctaccgttgatggcgactatgtagcagatggagatgcaattgcttctgctgatgctaacgctgattttgtagacggtgttgttgatggtgctggtcgcgcgtcatttagcaatgctgcgtatagctccgatggaaccactctcgacggtgagggtgcgagcgttgatgcacagggtaacccgcttcatgctgatggcacaccaatgagtgctgctgaagctgaaatgaagatggctggtctgagctcgtcaggaaccatgatggagaaatctggtgtgaaatcgagtggcattaccactgcagcggatgtcatggacgatcagtctctggcaagcagtgtcactgagtctggtctgtccaagattccagacacctatggtgcagatgtctcgggtgctgcgggcacagtcggaactaccggtgctgattacagtgcgaccgattcaagcgcaggtctgaacatgagcgaggctgcattgcagagtggcaccccaatgggcgctctcgctggtggatctgtgtcgagttccgatcaggccatgaatgacgcagctcttcagattgcagcgtctcagggtcttgcaccagcaggttccatagctggtatggagcaacttagtgctcaagccactgaagcacctgctggaaaggccggcaagcagcttggcgatctttctggctcagcgctcaatactcagctggcgtccatgggacagcaggtaggtgacagtgtgaacagcgcttatgctgcaggcggtatgggtggtgttgatgtggctggcaaggtcaccgaggcagcacagcacttgtctcaggttccaggtcagattcagaatgctgtgaccaatgcggatgctggttcctctggcgcaagctttggtcagatggcacagggggcagctggtattgccggtgtcgcaggtgtgatcggtgcagcgggcgcagcaagctctgcagcacaaggcgcaggtactgtccagggtgcgatgggtaatgctgcagctggtgcgggaatgatcaacaacgctgtttccggtggagctactggctcaacaggtgccgcacatgtggtcaatgcatcacatggaccagtggcgcctggtcaggctcactaccaagagtctggtcatgcacaagcatttgtgcagaacaaccaggccaacaccgcgcacacagcaaacacgcgtgcaccgtcatcagctcaaattatgggcgcgaacgttgctggctcactggcatcacaggctgtacgaggaatcggtcagcctggtcagatgggtgctaatgttcgcgacgcgatgggtggcagcggacgctctggtggccgtggtggagcaactcaaggcggtcgaggcgcacagcgcagcggtgtcagtgctaagaacggtatccgtgcacagcgaggtcagaagccttctgtgaccggccaggcgatgaatgcagcaatgcgttcagcagcggtaagcggtcgcatggcaaacatggacggcaacagtgtaggtggcactgaagcagatccacagcaggggagtggcgtaaccgagaagggtgataaaggcgttaaatagcgtgtaaaacacaatgaccg

SEQ ID NO: 772 - protein, 1488 aa, Corynebacterium glutamicum
VTATVLEPQPVQLSEQDVDAEIARMELKHNRHKTWRRRTMAVVMTLLISVGLSFGAFGNKEREANAFASAIIAQVVGAMGEVAFEAICPSDGDTEMLLKCITENLGEMHIIEKCLEAEDVLKCFYDAKNEEQRKEQNLDKAPDYSMYRMASAMASFYGNGRAATAGVEEGGPNEFLDSEDAGLKVWEGILSKAANGGNVLGYADAKHNEDSGWFFGNGVANNEKTYSYDSLADHAFQGPYHFALFGATLSGLGFDSSKAEDSQTDFAQRKGMGYAMMIAYIISGGIDLVFNTVLNILSTINPFRLLVGPVSQNTNKTFTENMAGGQTTEGTPFEGMTDFFGLIYNWSVTVGWLIGIPVSIGLFMMGALMFRRMDKGSAFKKVVIRVVYGVVGLPLLGVSYTGALDSFLDSGSSTSAGSNATKIVLSTYVDFQSWAENTRMRVPDKVTLAWSLEDQAPTGQSMRMVRNSALEINAQSNESFTTFKNPGSMDLGYSMDWMEKMADPANSGTDGTSSSSATTIFQGTIALLSRYIDNDSISSGSFETSIRSAMESLTSKEGSGEAVAGGDVMAWVTGYNTASGLNEITAAELADANNPLLEVSDSAGLQGRPIDRNAVSFKSGDATASCNNSVVTGSRAVVGDYRSDCNMSPLTMYNFLNTSFHPADASVFSTSTSASSYTRASHSAVSLIGSGAMNFVYWFSAMSLMGSFIVIGIGYAGAMLFNTIRRTLSLIGAVPFAAMGFIAGVAKVIVYTIAMLVEVIGTIILYQLITRFLMAVPALFEQPLADSLSSNESAELVAGAGMGLVGMALATSGNWAIAGMVITVASSMGVIIFTIIAMKVRGSLVSGVDETVTSVINRFLDTQVSSAGATSGDGMMRRAAATGLGIGATHMVLNRDGDGGGSDSGSGGSGGGSDSGLGEKAAGLAKVVTTVAGAGLVGKYATDALDNYADGVINGDGDGAFAAGGDATVDGDYVADGDAIASADANADFVDGVVDGAGRASFSNAAYSSDGTTLDGEGASVDAQGNPLHADGTPMSAAEAEMKMAGLSSSGTMMEKSGVKSSGITTAADVMDDQSLASSVTESGLSKIPDTYGADVSGAAGTVGTTGADYSATDSSAGLNMSEAALQSGTPMGALAGGSVSSSDQAMNDAALQIAASQGLAPAGSIAGMEQLSAQATEAPAGKAGKQLGDLSGSALNTQLASMGQQVGDSVNSAYAAGGMGGVDVAGKVTEAAQHLSQVPGQIQNAVTNADAGSSGASFGQMAQGAAGIAGVAGVIGAAGAASSAAQGAGTVQGAMGNAAAGAGMINNAVSGGATGSTGAAHVVNASHGPVAPGQAHYQESGHAQAFVQNNQANTAHTANTRAPSSAQIMGANVAGSLASQAVRGIGQPGQMGANVRDAMGGSGRSGGRGGATQGGRGAQRSGVSAKNGIRAQRGQKPSVTGQAMNAAMRSAAVSGRMANMDGNSVGGTEADPQQGSGVTEKGDKGVK

SEQ ID NO: 773 - DNA, 916 bp, Corynebacterium glutamicum
  CDS (101)..(916): FRXA00739
ttaaagtttctatattccattctaaaataactttgaattggggattaatgaaactttttaagcaattgtttaaaacgaatattgagggggtggcgggcaagtgactgcgacagttttagaaccgcaacctgtacagcttagtgagcaggacgtagatgctgagattgcgcgcatggagcttaaacacaaccgacacaagacgtggcgacgccgaacgatggctgttgtcatgacgctcttgatctcagtgggtttgagctttggtgcgtttggtaacaaggaacgtgaagctaatgctttcgccagcgctattattgcccaggttgtcggtgctatgggcgaggttgcctttgaagcgatttgtcccagtgatggtgacaccgagatgcttcttaagtgcatcaccgagaacttaggtgaaatgcacattatcgagaagtgtctcgaagcagaagatgtcttgaagtgcttctacgatgcgaaaaacgaagagcaacgtaaagaacagaaccttgataaagcccctgattactccatgtaccgtatggcctctgcgatggcatcgttctatggcaatggtcgggcagctactgccggtgtagaggaaggcggaccgaacgagttcctcgattctgaggacgccggtcttaaggtgtgggagggcattctcagtaaggccgccaacggaggcaatgtccttggttatgctgacgcgaaacacaacgaggactctggttggttctttggtaatggtgttgccaacaacgagaaaacgtactcctatgattctctagctgatcatgcctttcaagggccttatcactttgcattatttggcgcgacactgagtggcttaggctttgatagctcaaaggcggaggattcgcagactgattttgctcagcgtaagggcatg

SEQ ID NO: 774 - protein, 272 aa, Corynebacterium glutamicum
VTATVLEPQPVQLSEQDVDAEIARMELKHNRHKTWRRRTMAVVMTLLISVGLSFGAFGNKEREANAFASAIIAQVVGAMGEVAFEAICPSDGDTEMLLKCITENLGEMHIIEKCLEAEDVLKCFYDAKNEEQRKEQNLDKAPDYSMYRMASAMASFYGNGRAATAGVEEGGPNEFLDSEDAGLKVWEGILSKAANGGNVLGYADAKHNEDSGWFFGNGVANNEKTYSYDSLADHAFQGPYHFALFGATLSGLGFDSSKAEDSQTDFAQRKGM

SEQ ID NO: 775 - DNA, 2083 bp, Corynebacterium glutamicum
  CDS (101)..(2083): FRXA01587
catttagactggtcggtggacccgttcttagaatactaacaagacattcactgagaatatggctggtgggcagaccacagaaggaacaccgcttggaggaatgactgatttcttcgggttgatctataactggtcagtgactgtgggctggctcatcggtattcctgtctccattggtctgtttatgatgggtgcgttgatgtttcgacgcatggacaagggatcagcgtttaaaaaggttgttatccgcgtcgtgtacggtgtcgttggcctgccactgcttggtgtctcttataccggtgcgctggattccttcctcgacagcggtagttccacaagtgctggatcaaatgcgacaaagattgtgttgtccacctacgtggatttccaatcatgggcagaaaacacccgtatgcgtgttcctgacaaagtaacactggcgtggagtctggaggatcaggcgccaacagggcagtccatgcggatggtacgcaattcggcgttggaaattaatgctcaatcaaatgagagttttactacttttaagaatccaggttccatggatctaggctatagcatggactggatggaaaagatggcggatccagccaattctggcaccgatgggacctcatcaagttcggcgacgactattttccagggaaccatcgcgctactgagtcgttatatcgacaacgacagtatctcctctggcagtttcgaaacctctattcgaagtgcgatggaatctttgacctcgaaagagggaagtggcgaagctgttgccggtggtgatgtaatggcctgggttactggttacaacacagcctctggtcttaatgagatcactgctgctgaattagctgatgcgaacaatccattgcttgaggtcagcgactcagctggtctgcagggacgacctattgaccgcaatgcggtgtcatttaaatctggtgatgcgacagcgtcatgcaacaactcagtcgtgacaggttctcgtgctgtggtcggggactaccgaagtgactgcaatatgtcgcccttgacgatgtacaacttcctcaacacctcattccatccagctgatgcaagtgtcttttctacgtccacttctgcgtcaagctacacccgtgcatcgcatagcgcagtgagtcttatcggttctggtgccatgaactttgtgtactggttctctgcaatgtccctgatgggtagcttcatcgtgatcggtatcggttacgccggtgccatgctgtttaatacgattcgacgcacgctgtcgctcattggtgccgttccttttgctgcgatgggctttattgctggtgttgccaaggtcattgtgtacaccatcgctatgctcgtagaggttatcggaacgatcattttgtaccagctcattacccggttcttgatggctgtaccagcactctttgaacaacctttggctgattccttaagtagtaacgagagtgctgagctggttgccggtgctggtatggggctagtcggtatggcactagctacctcaggcaactgggcgattgccggcatggtgatcacagtggcctcatccatgggggtcatcatcttcacgattattgcgatgaaggtgcgcggatctttggtatcaggtgtcgatgaaaccgtgaccagtgttattaaccgcttcttggatacacaggtctcttctgcaggtgctacctctggtgacggcatgatgcgtcgtgcagccgcaacgggtcttggtattggtgcgacacatatggtactcaaccgtgatggtgacggtggtggatctgattcaggctctggtggatcaggtggcggtagcgattcaggcttgggtgagaaggctgctggtctggcgaaggttgtcacaactgtggctggtgccggattagtcggtaagtatgctacggatgcgctcgataattatgcagatggcgttatcaacggcgacggtgatggtgcgttcgcagcaggtggtgacgctaccgttgatggcgactatgtagcagatggagatgcaattgcttctgctgatgctaacgctgattttgtagacggggttgctgatggt

SEQ ID NO: 776 - protein, 661 aa, Corynebacterium glutamicum
MTDFFGLIYNWSVTVGWLIGIPVSIGLFMMGALMFRRMDKGSAFKKVVIRVVYGVVGLPLLGVSYTGALDSFLDSGSSTSAGSNATKIVLSTYVDFQSWAENTRMRVPDKVTLAWSLEDQAPTGQSMRMVRNSALEINAQSNESFTTFKNPGSMDLGYSMDWMEKMADPANSGTDGTSSSSATTIFQGTIALLSRYIDNDSISSGSFETSIRSAMESLTSKEGSGEAVAGGDVMAWVTGYNTASGLNEITAAELADANNPLLEVSDSAGLQGRPIDRNAVSFKSGDATASCNNSVVTGSRAVVGDYRSDCNMSPLTMYNFLNTSFHPADASVFSTSTSASSYTRASHSAVSLIGSGAMNFVYWFSAMSLMGSFIVIGIGYAGAMLFNTIRRTLSLIGAVPFAAMGFIAGVAKVIVYTIAMLVEVIGTIILYQLITRFLMAVPALFEQPLADSLSSNESAELVAGAGMGLVGMALATSGNWAIAGMVITVASSMGVIIFTIIAMKVRGSLVSGVDETVTSVINRFLDTQVSSAGATSGDGMMRRAAATGLGIGATHMVLNRDGDGGGSDSGSGGSGGGSDSGLGEKAAGLAKVVTTVAGAGLVGKYATDALDNYADGVINGDGDGAFAAGGDATVDGDYVADGDAIASADANADFVDGVADG

SEQ ID NO: 777 - DNA, 1541 bp, Corynebacterium glutamicum
  CDS (1)..(1518): FRXA01761
gctgatgctaacgctgattttgtagacggtgttgttgatggtgctggtcgcgcgtcatttagcaatgctgcgtatagctccgatggaaccactctcgacggtgagggtgcgagcgttgatgcacagggtaacccgcttcatgctgatggcacaccaatgagtgctgctgaagctgaaatgaagatggctggtctgagctcgtcaggaaccatgatggagaaatctggtgtgaaatcgagtggcattaccactgcagcggatgtcatggacgatcagtctctggcaagcagtgtcactgagtctggtctgtccaagattccagacacctatggtgcagatgtctcgggtgctgcgggcacagtcggaactaccggtgctgattacagtgcgaccgattcaagcgcaggtctgaacatgagcgaggctgcattgcagagtggcaccccaatgggcgctctcgctggtggatctgtgtcgagttccgatcaggccatgaatgacgcagctcttcagattgcagcgtctcagggtcttgcaccagcaggttccatagctggtatggagcaacttagtgctcaagccactgaagcacctgctggaaaggccggcaagcagcttggcgatctttctggctcagcgctcaatactcagctggcgtccatgggacagcaggtaggtgacagtgtgaacagcgcttatgctgcaggcggtatgggtggtgttgatgtggctggcaaggtcaccgaggcagcacagcacttgtctcaggttccaggtcagattcagaatgctgtgaccaatgcggatgctggttcctctggcgcaagctttggtcagatggcacagggggcagctggtattgccggtgtcgcaggtgtgatcggtgcagcgggcgcagcaagctctgcagcacaaggcgcaggtactgtccagggtgcgatgggtaatgctgcagctggtgcgggaatgatcaacaacgctgtttccggtggagctactggctcaacaggtgccgcacatgtggtcaatgcatcacatggaccagtggcgcctggtcaggctcactaccaagagtctggtcatgcacaagcatttgtgcagaacaaccaggccaacaccgcgcacacagcaaacacgcgtgcaccgtcatcagctcaaattatgggcgcgaacgttgctggctcactggcatcacaggctgtacgaggaatcggtcagcctggtcagatgggtgctaatgttcgcgacgcgatgggtggcagcggacgctctggtggccgtggtggagcaactcaaggcggtcgaggcgcacagcgcagcggtgtcagtgctaagaacggtatccgtgcacagcgaggtcagaagccttctgtgaccggccaggcgatgaatgcagcaatgcgttcagcagcggtaagcggtcgcatggcaaacatggacggcaacagtgtaggtggcactgaagcagatccacagcaggggagtggcgtaaccgagaagggtgataaaggcgttaaatagcgtgtaaaacacaatgaccg

SEQ ID NO: 778 - protein, 506 aa, Corynebacterium glutamicum
ADANADFVDGVVDGAGRASFSNAAYSSDGTTLDGEGASVDAQGNPLHADGTPMSAAEAEMKMAGLSSSGTMMEKSGVKSSGITTAADVMDDQSLASSVTESGLSKIPDTYGADVSGAAGTVGTTGADYSATDSSAGLNMSEAALQSGTPMGALAGGSVSSSDQAMNDAALQIAASQGLAPAGSIAGMEQLSAQATEAPAGKAGKQLGDLSGSALNTQLASMGQQVGDSVNSAYAAGGMGGVDVAGKVTEAAQHLSQVPGQIQNAVTNADAGSSGASFGQMAQGAAGIAGVAGVIGAAGAASSAAQGAGTVQGAMGNAAAGAGMINNAVSGGATGSTGAAHVVNASHGPVAPGQAHYQESGHAQAFVQNNQANTAHTANTRAPSSAQIMGANVAGSLASQAVRGIGQPGQMGANVRDAMGGSGRSGGRGGATQGGRGAQRSGVSAKNGIRAQRGQKPSVTGQAMNAAMRSAAVSGRMANMDGNSVGGTEADPQQGSGVTEKGDKGVK

SEQ ID NO: 779 - DNA, 1065 bp, Corynebacterium glutamicum
  CDS (101)..(1042): RXN01765
gcagtccgtcggtgtcgttttccctgaactgccggcagagcttcagccacaaatcccagtcaaggcataacaccgcacaccaagaattttaggaggggtcatgagcaacaacgtagtgaaatatgagtgcgcggtcgacgccgacaacattgtcgcagtcgatatgcatgtgcacttggaagtcgacagctgcggacacaaatcgatgccggcagacatcatggcggcatcctcgaagtactttaagaccgcggaacgaactccctcagcagatgccattgctgatatttatagggaacacaagatggcggcggtggttttcaccatcgatgcgcggacccaaatggggcatctgccgaactcgattgatgatttggtggcaagctgtgcccgcaacaatgacgtgctgatcccttttggcagtgtggatcctcgtaccggcgaggacgcgctggtggaagctcgccgacaggtggaagaactcggggtgcgaggcttcaaattccatccatcggttcaaggattcgacccatccgcgccagagttctacccactgtgggaattgctcgaaagttttggattgccatgcgtgttccataccggacaaaacggcatgggtgcaggtcttccaggtggtcgaggcattaagctgcgcttctccaacccaatgttgcttgatgatgttgcggcggacttcccgaacctgaccatcatcatggcgcacccttctgttccttggcaggatgaggctaactcgattgccacccacaaggccaatgtgttcattgatctttccggctggtcgccgaagtatttcccagagtctttggtcagacagtccaataacgtgctatccaagaaggtgctgtttggcacggacttcccgctgattaccccagagaaatggcttgcggctttcgcgaatctgccactgaaggatgaggttcgtccgggaatcctcaaagacaatgcggtgaaggtacttggcctagccgctagcactgagcgcggatctcaagcagaaaaggtcgtgcaacatgcgtgatcccattcaaggtgctgtta

SEQ ID NO: 780 - protein, 314 aa, Corynebacterium glutamicum
MSNNVVKYECAVDADNIVAVDMHVHLEVDSCGHKSMPADIMAASSKYFKTAERTPSADAIADIYREHKMAAVVFTIDARTQMGHLPNSIDDLVASCARNNDVLIPFGSVDPRTGEDALVEARRQVEELGVRGFKFHPSVQGFDPSAPEFYPLWELLESFGLPCVFHTGQNGMGAGLPGGRGIKLRFSNPMLLDDVAADFPNLTIIMAHPSVPWQDEANSIATHKANVFIDLSGWSPKYFPESLVRQSNNVLSKKVLFGTDFPLITPEKWLAAFANLPLKDEVRPGILKDNAVKVLGLAASTERGSQAEKVVQHA

SEQ ID NO: 781 - DNA, 1065 bp, Corynebacterium glutamicum; identical to SEQ ID NO: 779
  CDS (101)..(1042): FRXA01765

SEQ ID NO: 782 - protein, 314 aa, Corynebacterium glutamicum; identical to SEQ ID NO: 780

SEQ ID NO: 783 - DNA, 588 bp, Corynebacterium glutamicum
  CDS (101)..(565): RXN01767
acaccagccctccacaagagcgtcgaagcaatctacgcttcgacgctctttttttcactacctactcatcccccacataagaaaaaaagacgacaccaccatgattgaccataaactgtggtttaacacagtaaccaacaacgcctctgtccgagaagctgcaggaaaatgcgacatacccatcagaacgctcaacgagcagcttaaccgtcgaatactccctgaaaagaccgtcatcgctctagcacgcgcttatgatctctcacctgttgatgcgctcgttcgcaccggacacctcaccgaagaagaggctggtagtcgtgaagaagatgccagcccagattcagctgacgactaccctacctgggcactgaactcgcaccttgactatggcattctcggagcttttggcgacatcgctgaagaagtaaacagcgaaagagttaaccgcgacaacgccatagagcaaattcgcgcatggctcgacgagcttccaggcagcctattcaacaacctccgcagcactaaaacaggctacatcgaactattcgagacctatctcgattaaacccaaccagcacaacaata

SEQ ID NO: 784 - protein, 155 aa, Corynebacterium glutamicum
MIDHKLWFNTVTNNASVREAAGKCDIPIRTLNEQLNRRILPEKTVIALARAYDLSPVDALVRTGHLTEEEAGSREEDASPDSADDYPTWALNSHLDYGILGAFGDIAEEVNSERVNRDNAIEQIRAWLDELPGSLFNNLRSTKTGYIELFETYLD

SEQ ID NO: 785 - DNA, 436 bp, Corynebacterium glutamicum
  CDS (101)..(436): FRXA01767
acaccagccctccacaagagcgtcgaagcaatctacgcttcgacgctctttttttcactacctactcatcccccacataagaaaaaaagacgacaccaccatgattgaccataaactgtggtttaacacagtaaccaacaacgcctctgtccgagaagctgcaggaaaatgcgacatacccatcagaacgctcaacgagcagcttaaccgtcgaatactccctgaaaagaccgtcatcgctctagcacgcgcttatgatctctcacctgttgatgcgctcgttcgcaccggacacctcaccgaagaagaggctggtagtcgtgaagaagatgccagcccagattcagctgacgactaccctacctgggcactgaactcgcaccttgactatggcattctcggagcttttggcgacatcgctgaagaagtaaacagc

SEQ ID NO: 786 - protein, 112 aa, Corynebacterium glutamicum
MIDHKLWFNTVTNNASVREAAGKCDIPIRTLNEQLNRRILPEKTVIALARAYDLSPVDALVRTGHLTEEEAGSREEDASPDSADDYPTWALNSHLDYGILGAFGDIAEEVNS

SEQ ID NO: 787 - DNA, 564 bp, Corynebacterium glutamicum
  CDS (101)..(541): RXN01769
attttcaacaaccaggactaaaacacctgctgctgttgagcgcttctcacacatcatcctcacaaccccgttgcagcaccagcataaatctatattcgctgtgacggggttgttggggcgcgccccacattcactctttttcccgattggtttctactacacacccatgacctctattactactaccgataccccgctatatacagcactgccccatacccgtatctctgatgcggaattgttgacaccaacaacaactgtgcacgagattctcgtttacggaccggctgagtgcccagggtgtacagcaacgcttgacttctttgcacgcaaaaacatgccggccaccaaagtcactgtagctgccggtgatgtagcacatacctacatcacccaagacttaggttatctccaagcaccgattgtcactgtccgtatcagttcctctgcttctaaccacgacaacgaacacaacacccagatcctgcactggtccggcgttaatcgctacctcatgcaggcactctcccgtactcatttctagaaaggtttttcccgtcatgt

SEQ ID NO: 788 - protein, 147 aa, Corynebacterium glutamicum
VTGLLGRAPHSLFFPIGFYYTPMTSITTTDTPLYTALPHTRISDAELLTPTTTVHEILVYGPAECPGCTATLDFFARKNMPATKVTVAAGDVAHTYITQDLGYLQAPIVTVRISSSASNHDNEHNTQILHWSGVNRYLMQALSRTHF

SEQ ID NO: 789 - DNA, 552 bp, Corynebacterium glutamicum
  CDS (101)..(529): FRXA01769
caggactaaaacacctgctgctgttgagcgcttctcacacatcatcctcacaaccccgttgcagcaccagcataaatctatattcgctgtgacggggttgttggggcgcgccccacattcactctttttcccgattggtttctactacacacccatgacctctattactactaccgataccccgctatatacagcactgccccatacccgtatctctgatgcggaattgttgacaccaacaacaactgtgcacgagattctcgtttacggaccggctgagtgcccagggtgtacagcaacgcttgacttctttgcacgcaaaaacatgccggccaccaaagtcactgtagctgccggtgatgtagcacatacctacatcacccaagacttaggttatctccaagcaccgattgtcactgtccgtatcagttcctctgcttctaaccacgacaacgaacacaacacccagatcctgcactggtccggcgttaatcgctacctcatgcaggcactctcccgtactcatttctagaaaggtttttcccgtcatgt

SEQ ID NO: 790 - protein, 143 aa, Corynebacterium glutamicum
LGRAPHSLFFPIGFYYTPMTSITTTDTPLYTALPHTRISDAELLTPTTTVHEILVYGPAECPGCTATLDFFARKNMPATKVTVAAGDVAHTYITQDLGYLQAPIVTVRISSSASNHDNEHNTQILHWSGVNRYLMQALSRTHF

SEQ ID NO: 791 - DNA, 825 bp, Corynebacterium glutamicum
  CDS (101)..(802): RXN01771
tgccccgctgttggtggttccggagcggcgataatcgctaaacgtttgaggtgattgtatgggtattttcaggtcgcggtcgcaggattttgggtggagcatgcaccaggctggccagctcatcaatgatcccagtcagggtctgtggcgcacttctgccctgcgctcgccggttgctcgggttggacatgccgtgttgcgccagcgtgccggtgagatctcgcgcatgcaaggtcgtgagttttctcgccctggggatcagttccgacaggtagatttgcgcaggcgactgattcaggtccatccccaatcaattcctacagcggatgcgatggccgtaaccatcaccatggcgctcaccgctgccacgattgatccggtgaagttcgtcgcggattcacagaacccggatgaagagatttatttggcagctcagatcgcattgcgggaaatggttatcgctatgcctttggaggatttcatcggggtgcgcattgatctagagcctgttttggtggctgctcaagctgctgcgaagaatgtgggcgtggaagtctcgtcaatcttgctgaaggatctgaatcttccccaggagtactcgggagcgttgcaggaatcgatcgttgcgaaaattcaagccgaaactgatctggaacgtgcacgaaatgaagtgaaaactacccgtgctcgacttgccagcgcgaaagtgttggagcaaaatccgattcttgccaaaattcggatgattgaagcgctcccaccgggatccacaattgaggttcgggagggtgactcaaaggcataaagttgcccatttcggtgccc

SEQ ID NO: 792 - protein, 234 aa, Corynebacterium glutamicum
MHQAGQLINDPSQGLWRTSALRSPVARVGHAVLRQRAGEISRMQGREFSRPGDQFRQVDLRRRLIQVHPQSIPTADAMAVTITMALTAATIDPVKFVADSQNPDEEIYLAAQIALREMVIAMPLEDFIGVRIDLEPVLVAAQAAAKNVGVEVSSILLKDLNLPQEYSGALQESIVAKIQAETDLERARNEVKTTRARLASAKVLEQNPILAKIRMIEALPPGSTIEVREGDSKA

SEQ ID NO: 793 - DNA, 825 bp, Corynebacterium glutamicum; identical to SEQ ID NO: 791
  CDS (101)..(802): FRXA01771

SEQ ID NO: 794 - protein, 234 aa, Corynebacterium glutamicum; identical to SEQ ID NO: 792

SEQ ID NO: 795 - DNA, 849 bp, Corynebacterium glutamicum
  CDS (101)..(826): RXN01774
ctgcgcaagaagagaaaaaacaacgacagcgaagctgcgttcgggcgaatcggcgataatcacacaccactcttcctgagagaatcctgaggtcatcaccatgtcaccgaacttccaagctcgcggtactactgcgcccactgttgctttgtccatgcgccagatcgcgcacatccgtgaagaaattaagaaatcaccactcgctgcttccgttttcatcacacccaccaccaaacaaatggttgtccgagatctagaatcactgttccagcagctctaccacacagatctacctgaaccatccatcaaagacagtggtcttatcagtgctatcggctctagcgccggcaataccaataatccagcactcgccctagaaactcagatggcttaccacctggtgcttgctatgcaccacaccgatgttgctacctggcacaaggtggtgaccaaaaacatcaccgaatctgctgctgcacaagatgctgcggtcgagcacagtgctaaatacgatgctgtgtacgatgccgcacaacttatgggcatcactgttgaggaaggtaatgtcggtagcatcgctattgcctttagcacagcacgtgcagacggtaaatctgattggtgtgtttccggcatcagccgctacatcgaggtcaccgaagccttggatgctgcgcgagctgtcactaaaaatactgatgcgctcaataaaactgctctaccagacgtgcagccggcgccggttgtgcattcagcacagttcatgaacaagtccgcacacgatcatggggttaatactgcggaaaaagatcaaccaaccctgttttaaaagactgtccatttaacaac

SEQ ID NO: 796 - protein, 242 aa, Corynebacterium glutamicum
MSPNFQARGTTAPTVALSMRQIAHIREEIKKSPLAASVFITPTTKQMVVRDLESLFQQLYHTDLPEPSIKDSGLISAIGSSAGNTNNPALALETQMAYHLVLAMHHTDVATWHKVVTKNITESAAAQDAAVEHSAKYDAVYDAAQLMGITVEEGNVGSIAIAFSTARADGKSDWCVSGISRYIEVTEALDAARAVTKNTDALNKTALPDVQPAPVVHSAQFMNKSAHDHGVNTAEKDQPTLF

SEQ ID NO: 797 - DNA, 883 bp, Corynebacterium glutamicum
  CDS (101)..(883): FRXA01774
ctgcgcaagaagagaaaaaacaacgacagcgaagctgcgttcgggcgaatcggcgataatcacacaccactcttcctgagagaatcctgaggtcatcaccatgtcaccgaacttccaagctcgcggtactactgcgcccactgttgctttgtccatgcgccagatcgcgcacatccgtgaagaaattaagaaatcaccactcgctgcttccgttttcatcacacccaccaccaaacaaatggttgtccgagatctagaatcactgttccagcagctctaccacacagatctacctgaaccatccatcaaagacagtggtcttatcagtgctatcggctctagcgccggcaataccaataatccagcactcgccctagaaactcagatggcttaccacctggtgcttgctatgcaccacaccgatgttgctacctggcacaaggtggtgaccaaaaacatcaccgaatctgctgctgcacaagatgctgcggtcgagcacagtgctaaatacgatgctgtgtacgatgccgcacaacttatgggcatcactgttgaggaaggtaatgtcggtagcatcgctattgcctttagcacagcacgtgcagacggtaaatctgattggtgtgtttccggcatcagccgctacatcgaggtcaccgaagccttggatgctgcgcgagctgtcactaaaaatactgatgcgctcaataaaactgctctaccagacgtgcagccggcgccggttgtgcattcagcacagttcatgaacaagtccgcacacgatcatggggttaatactgcggaaaaagatcaaccaacctgtttaaagactgtgcatttacaaccacatcgttacccccgaacaggctttaaggctattcaa

SEQ ID NO: 798 - protein, 261 aa, Corynebacterium glutamicum
MSPNFQARGTTAPTVALSMRQIAHIREEIKKSPLAASVFITPTTKQMVVRDLESLFQQLYHTDLPEPSIKDSGLISAIGSSAGNTNNPALALETQMAYHLVLAMHHTDVATWHKVVTKNITESAAAQDAAVEHSAKYDAVYDAAQLMGITVEEGNVGSIAIAFSTARADGKSDWCVSGISRYIEVTEALDAARAVTKNTDALNKTALPDVQPAPVVHSAQFMNKSAHDHGVNTAEKDQPTCLKTVHLQPHRYPRTGFKAIQ

SEQ ID NO: 799 - DNA, 816 bp, Corynebacterium glutamicum
  CDS (101)..(793): RXN01787
cagaagcacgtattttcttcttaactcgcacctcatctggtgtgggtttttttgcattttttacacaccccactccacacacactcgcaaaggattcatcatgagcaacaatgctcttttagtagcaaacgaagccgacatcggtctctacctccactggaatggtggtcgcgactcgattgaggcgtttctcgcctacgccgcatacgcgcagttaccacccatcaacgaaaataacgattggttgccaccgtttattactgtgctgaagaacttcttcggcaatgatggttctggcgtctacctcgaacctgtcaatcaggattatctcgacggcatcgactatgacaacggtgtttacatgcttgacgattatgagatcactgagcgtattaatccacccgctgttgagcaagactcccacgatctccacgacatgttgatcaaaattgataaagctcaaccacctgtcgatcaactcgggagttttctccatggcctagagacctctgtcgcagatttgggggttggtgatcgcgtatttttgccacgttttagcacctttgataagaaactcggtcgctaccgcatccacactgttctcggattcgctgagaacgatccgtttaaccctatgaccagcagcgagcgatttaaaggtaagccctatgtcgatatgttcgacaatcaagacaacgcctttaacccaaattcctatatcactacagataccgtgcgcatcgttgtcgatcctgtaccggaaactaatcccgacgatgagaaagcaggacgctagccatgtctcgcagctacccc

SEQ ID NO: 800 - protein, 231 aa, Corynebacterium glutamicum
MSNNALLVANEADIGLYLHWNGGRDSIEAFLAYAAYAQLPPINENNDWLPPFITVLKNFFGNDGSGVYLEPVNQDYLDGIDYDNGVYMLDDYEITERINPPAVEQDSHDLHDMLIKIDKAQPPVDQLGSFLHGLETSVADLGVGDRVFLPRFSTFDKKLGRYRIHTVLGFAENDPFNPMTSSERFKGKPYVDMFDNQDNAFNPNSYITTDTVRIVVDPVPETNPDDEKAGR

SEQ ID NO: 801 - DNA, 377 bp, Corynebacterium glutamicum
  CDS (1)..(354): FRXA01787
accgagaaaattgataaagctcaaccacctgtcgatcaactcgggagttttctccatggcctagagacctctgtcgcagatttgggggttggtgatcgcgtatttttgccacgttttagcacctttgataagaaactcggtcgctaccgcatccacactgttctcggattcgctgagaacgatccgtttaaccctatgaccagcagcgagcgatttaaaggtaagccctatgtcgatatgttcgacaatcaagacaacgcctttaacccaaattcctatatcactacagataccgtgcgcatcgttgtcgatcctgtaccggaaactaatcccgacgatgagaaagcaggacgctagccatgtctcgcagctacccc

SEQ ID NO: 802 - protein, 118 aa, Corynebacterium glutamicum
TEKIDKAQPPVDQLGSFLHGLETSVADLGVGDRVFLPRFSTFDKKLGRYRIHTVLGFAENDPFNPMTSSERFKGKPYVDMFDNQDNAFNPNSYITTDTVRIVVDPVPETNPDDEKAGR

SEQ ID NO: 803 - DNA, 897 bp, Corynebacterium glutamicum
  CDS (101)..(874): RXN01796
atgtaactcgatcaggtggaaatgcccgcaaaagtggcggcggtggccgagggatggccgttggtgcggcatcggtggcctgctactagtcgggctcttcttgctccttggcggtaaccctgccgagatcgaccaggttttaggtggcgatcaaacccagatcgagtctggagagtccaccggagccggcgactttgatcactgccaaaccggcgcagatgccaacgccagtgatgattgtcgcctttactacacctcattctccgtcaatgaaatgtggcagactttgcttccagctcaggctggtatcgaatacaccgagccgacattgactcttttcaaaaactccacccaaaccggctgcggtttcgcttctgcgtccactgggccgttttactgtccgtcagaccaagatgcttattttgacttgactttcttcgatcagatgcgtcagttcggtgcagaaaacgccccgcttgcccagatgtacatcgtggcgcacgagtacggccaccacgtccaaaacctcgagggcacactcggactgtccaattacaacgatccgggcgctgattccaacgccgtcaagatcgagttgcaggccgattgctacgcaggcatttgggctaatcactccagcgaaggcccggatccgctactccaacccatcaccgaatctgagctagattccgctctccttgctgcaagcgccgtgggcgacgacaatatccagcaacgatccggtggcgatgtcaatcctgaaagctggactcacggctcatcgcagcagcgcaaagacgcgttcctcgccggctacaacaccggccagatgagcgcctgcgacttcctcggccggggcgtctacaacgacgcttaaagcattgcttttcgacgtct

SEQ ID NO: 804 - protein, 258 aa, Corynebacterium glutamicum
LLLGGNPAEIDQVLGGDQTQIESGESTGAGDFDHCQTGADANASDDCRLYYTSFSVNEMWQTLLPAQAGIEYTEPTLTLFKNSTQTGCGFASASTGPFYCPSDQDAYFDLTFFDQMRQFGAENAPLAQMYIVAHEYGHHVQNLEGTLGLSNYNDPGADSNAVKIELQADCYAGIWANHSSEGPDPLLQPITESELDSALLAASAVGDDNIQQRSGGDVNPESWTHGSSQQRKDAFLAGYNTGQMSACDFLGRGVYNDA

SEQ ID NO: 805 - DNA, 506 bp, Corynebacterium glutamicum
  CDS (1)..(483): FRXA01796
ttttactgtccgtcagaccaagatgcttatgttgacttgactttgttcgatcagatgcgtcagttcggtgcagaaaacgccccgcttgcccagatgtacatcgtggcgcacgagtacggccaccacgtccaaaacctcgagggcacactcggactgtccaattacaacgatccgggcgctgattccaacgccgtcaagatcgagttgcaggccgattgctacgcaggcatttgggctaatcactccagcgaaggcccggatccgctactccaacccatcaccgaatctgagctagattccgctctccttgctgcaagcgccgtgggcgacgacaatatccagcaacgatccggtggcgatgtcaatcctgaaagctggactcacggctcatcgcagcagcgcaaagacgcgttcctcgccggctacaacaccggccagatgagcgcctgcgacttcctcggccggggcgtctacaacgacgcttaaagcattgcttttcgacgtct

SEQ ID NO: 806 - protein, 161 aa, Corynebacterium glutamicum
FYCPSDQDAYVDLTLFDQMRQFGAENAPLAQMYIVAHEYGHHVQNLEGTLGLSNYNDPGADSNAVKIELQADCYAGIWANHSSEGPDPLLQPITESELDSALLAASAVGDDNIQQRSGGDVNPESWTHGSSQQRKDAFLAGYNTGQMSACDFLGRGVYNDA

SEQ ID NO: 807 - DNA, 1083 bp, Corynebacterium glutamicum
  CDS (101)..(1060): RXN01803
ctagcggaaaggctttagcgacaaggctttttgcatgttttaatgcagggaatattaactttttgttaatctctgaccattgaccttgtacgcttaaaacatgcgaaagaaaaaagacggtcaaaatctcccagacttccggaaaaatccgccaaagctggataaaaaggcttatgaaaaagaactaaaaagacttcaagccgaactcgtcgatttgcaacaatgggttgtggaaaccggtgcgcgcgtggtcatcgtcatggaaggccgcgacgccgctggtaaaggttctgcgatcaagcgcattacgcagtacctcaacccccggtccgcaaggatcgaagcgctgcccaccccaaactctcgggaaaaagggcagtggtatttccagcgctacatcgaaaaattgccgactgctggtgagatcgttatctttgaccgctcctggtacaaccgtgcaggagtcgagcgcgtcatgggattttgcacctcccaggagtaccgccgattccttcaccaggcaccaatctttgaacgcctgttggtggaagatggcattcacctgcgtaaatactggttctctgtatctgatgaagagcagattgagcgtttcgaagaccgcctgagcgatccgctgcgccggtggaagttgtcgccaatggatttacaatcgatcacccgctgggaagattactcacgcgcaaaagatgagatgttcatccacacggacatcccgtcagcaccgtggtacacggtggaatctgaggacaagaagcgttcccgcatcaacgtcatttcgcatctgctctcgacgattccttatgagaagatcgatcgtccattgccggaaatccctcatcgcccagattctgaatctgattatgtacgtccccctcgcgatgagttccgttatgttccagatgtggcagcacacttggaagaagagcgcatcaagaaagaagaaaaagccaagaaggcaaagaagccagctaaggctgcaggaaagaactcggataagcagaagtcttccggaggaaaaggcaagaagaagtccaagaaatagaacgccttttaaggggttga

SEQ ID NO: 808 - protein, 320 aa, Corynebacterium glutamicum
MRKKKDGQNLPDFRKNPPKLDKKAYEKELKRLQAELVDLQQWVVETGARVVIVMEGRDAAGKGSAIKRITQYLNPRSARIEALPTPNSREKGQWYFQRYIEKLPTAGEIVIFDRSWYNRAGVERVMGFCTSQEYRRFLHQAPIFERLLVEDGIHLRKYWFSVSDEEQIERFEDRLSDPLRRWKLSPMDLQSITRWEDYSRAKDEMFIHTDIPSAPWYTVESEDKKRSRINVISHLLSTIPYEKIDRPLPEIPHRPDSESDYVRPPRDEFRYVPDVAAHLEEERIKKEEKAKKAKKPAKAAGKNSDKQKSSGGKGKKKSKK

SEQ ID NO: 809 - DNA, 1083 bp, Corynebacterium glutamicum; identical to SEQ ID NO: 807
  CDS (101)..(1060): FRXA01803

SEQ ID NO: 810 - protein, 320 aa, Corynebacterium glutamicum; identical to SEQ ID NO: 808

SEQ ID NO: 811 - DNA, 1299 bp, Corynebacterium glutamicum
  CDS (101)..(1276): RXN01809
acaacacgacagttgtaactagtggtttcaacaccattatcggtatgactcgtggcgactcgtatctctctgatgatctcgatgacctgggttaaacccgatgaacgagcaggaacgagaagccttagaggatgctgcccttgaggaagctgccttagccgatgaattagctgcattagaggctgaagctggcgtacaagggtcagtcgagccttatgactatgcagcagaccttgatgatgaggacgagtttgatgaggacccttttgctcaggatgaaccccgtgacgctggtccgctaggtgagttgagcagtgataaccatgtctctgaggctgttgctgaagacactgggacaagtacagaagagtctgcacaagagggcagtcacgaagagtcggtagacaatccccgtgatttcaccggcactgcgacagcggtgcgatcttttcgacccagacttcccgtacccaatgcactgcgaccaggaccacccatccgaacacaaccggcagtgaacaccgacatagatgatggcgggcaagagaatacagctggcgcgactgccgcagatgtgggggcgggagtgttttttggtacgcattttgagctggcttttgggcaggttgatgttcaccgccacataaggcatgagcaggctatgcgagatggacaccaggatctcagcgtctttgtcggtgctgatggggcgatcatgctggaagaacttaaaaatcgttaccagcgcccaccggagaacgagccccatgatgatgatgtcaccgaaatgataaagaccaccgaggaaacagagaaggagaacgtagagatggatcaggatatagctgtagtagacaacgttgatgaacaggttgtggtgacacctgctcatgacgctgacagcgtagcggttgttgctgaacaggtcgttgcgtcagaaccaacgccagagccggtacccaaggttgagcacgtagagatgagtgtcgatctagcgggtgagactattacaccgattgatcaggcaattcggtcttttatgcagctcaacggtattgagcacagcgtggtgttgcgacgcttggggctgatgactcaggtggcacataataaggaacttgatgaggtctacgctaaggcacttgccgagggtgaatcccatgctcagcagcagcatgaattagaagcagaaaatgaacggcttaaaaaagaagttgatgcgctcgctgcagagcttagtgctgcgttgatgggcgagggtggtggtgatcatgactaaggccgtgacaccaattgtgg

SEQ ID NO: 812 - protein, 392 aa, Corynebacterium glutamicum
MNEQEREALEDAALEEAALADELAALEAEAGVQGSVEPYDYAADLDDEDEFDEDPFAQDEPRDAGPLGELSSDNHVSEAVAEDTGTSTEESAQEGSHEESVDNPRDFTGTATAVRSFRPRLPVPNALRPGPPIRTQPAVNTDIDDGGQENTAGATAADVGAGVFFGTHFELAFGQVDVHRHIRHEQAMRDGHQDLSVFVGADGAIMLEELKNRYQRPPENEPHDDDVTEMIKTTEETEKENVEMDQDIAVVDNVDEQVVVTPAHDADSVAVVAEQVVASEPTPEPVPKVEHVEMSVDLAGETITPIDQAIRSFMQLNGIEHSVVLRRLGLMTQVAHNKELDEVYAKALAEGESHAQQQHELEAENERLKKEVDALAAELSAALMGEGGGDHD

SEQ ID NO: 813 - DNA, 586 bp, Corynebacterium glutamicum
  CDS (101)..(586): FRXA01062
acaacacgacagttgtaactagtggtttcaacaccattatcggtatgactcgtggcgactcgtatctctctgatgatctcgatgacctgggttaaacccgatgaacgagcaggaacgagaagccttagaggatgctgcccttgaggaagctgccttagccgatgaattagctgcattagaggctgaagctggcgtacaagggtcagtcgagccttatgactatgcagcagaccttgatgatgaggacgagtttgatgaggacccttttgctcaggatgaaccccgtgacgctggtccgctaggtgagttgagcagtgataaccatgtctctgaggctgttgctgaagacactgggacaagtacagaagagtctgcacaagagggcagtcacgaagagtcggtagacaatccccgtgatttcaccggcactgcgacagcggtgcgatcttttcgacccagacttcccgtacccaatgcactgcgaccaggaccacccatccgaacacaaccggcagtgaacaccgacatatatgatggcgggcaagagaatacagctggcgcgactgccgcagatgtgggggcggga

SEQ ID NO: 814 - protein, 162 aa, Corynebacterium glutamicum
MNEQEREALEDAALEEAALADELAALEAEAGVQGSVEPYDYAADLDDEDEFDEDPFAQDEPRDAGPLGELSSDNHVSEAVAEDTGTSTEESAQEGSHEESVDNPRDFTGTATAVRSFRPRLPVPNALRPGPPIRTQPAVNTDIYDGGQENTAGATAADVGAG

SEQ ID NO: 815 - DNA, 659 bp, Corynebacterium glutamicum
  CDS (1)..(636): FRXA01809
cacataaggcatgagcaggctatgcgagatggacaccaggatctcagcgtctttgtcggtgctgatggggcgatcatgctggaagaacttaaaaatcgttaccagcgcccaccggagaacgagccccatgatgatgatgtcaccgaaatgataaagaccaccgaggaaacagagaaggagaacgtagagatggatcaggatatagctgtagtagacaacgttgatgaacaggttgtggtgacacctgctcatgacgctgacagcgtagcggttgttgctgaacaggtcgttgcgtcagaaccaacgccagagccggtacccaaggttgagcacgtagagatgagtgtcgatctagcgggtgagactattacaccgattgatcaggcaattcggtcttttatgcagctcaacggtattgagcacagcgtggtgttgcgacgcttggggctgatgactcaggtggcacataataaggaacttgatgaggtctacgctaaggcacttgccgagggtgaatcccatgctcagcagcagcatgaattagaagcagaaaatgaacggcttaaaaaagaagttgatgcgctcgctgcagagcttagtgctgcgttgatgggcgagggtggtggtgatcatgactaaggccgtgacaccaattgtgg

SEQ ID NO: 816 - protein, 212 aa, Corynebacterium glutamicum
HIRHEQAMRDGHQDLSVFVGADGAIMLEELKNRYQRPPENEPHDDDVTEMIKTTEETEKENVEMDQDIAVVDNVDEQVVVTPAHDADSVAVVAEQVVASEPTPEPVPKVEHVEMSVDLAGETITPIDQAIRSFMQLNGIEHSVVLRRLGLMTQVAHNKELDEVYAKALAEGESHAQQQHELEAENERLKKEVDALAAELSAALMGEGGGDHD

SEQ ID NO: 817 - DNA, 804 bp, Corynebacterium glutamicum
  CDS (101)..(781): RXN01811
gaaggagaagagacattgtctcaagaagagctgacattagtcgcattgaattcttatgaaaaaggagagttgccaaagaagaatatcattatttgaaaacgtgtttgaatttgatgataccttggcaaaagatatacaagtagaccgtacgtccatgcaagtattcgaagcttcagaaaccgtcaaagaagcgataaaagcttcgattgaacaaggacatactcgctatccggttatcttagaatcaaaagacaatgttttaggttatgtcaccttgccagatttgatcaagcaatcttataaagatgaccagctgacagtagaacagttgattgaagagccgatcgtaacaactgaaacgatccctataaaaaaattattgacgatcatgcgaaaaaagggaaagcatattgctatcttaaaagatgaatacggagggacaagcggcttagtgacgattgaagatattttagaagaaatcgtcggggaaatccgagatgagacagatttggacgaagcattgatagcggaacagtcagatggctcttatatcatctccggcaaactaacattagatgatttccagcgttattttcatgtagagattccagagtttgaagaaacgaattttactacacttgcgggctttgcttctagccgatataaagaaataaaagcaggaacaatcattgagattgcatcattccgtttcacggtattagaataccagcatgcacatatcgattatttcaaagtagagtccacggaaagaaaaacagaataaaagaaaaaaggctgtgacat

SEQ ID NO: 818 - protein, 227 aa, Corynebacterium glutamicum
VFEFDDTLAKDIQVDRTSMQVFEASETVKEAIKASIEQGHTRYPVILESKDNVLGYVTLPDLIKQSYKDDQLTVEQLIEEPIVTTETIPIKKLLTIMRKKGKHIAILKDEYGGTSGLVTIEDILEEIVGEIRDETDLDEALIAEQSDGSYIISGKLTLDDFQRYFHVEIPEFEETNFTTLAGFASSRYKEIKAGTIIEIASFRFTVLEYQHAHIDYFKVESTERKTE

SEQ ID NO: 819 - DNA, 789 bp, Corynebacterium glutamicum
  CDS (101)..(766): RXN01813
gcgagaattcaagaaaacaaaacagatcaaagtaaggcaacaagtgagcaacaaagttcagaatccgaaccaaggtggaagcaagaacttcctctgggcaatggtggcgatcgtcgtcgttgcaatcgtcgtcgtcggcttcatcgtcatccaaggccagggctcaaaagcagccaagcttggtgaccgcgactacgaagacacctctttggcaatggaagtaggctccgactccatcacgctgacctccgcaaacacctccgccgacgcaaagtccgtgcagctttttgaagacttctcctgctctcactgctccgagctctccctcgccaccgacgctgacatgaagactcagatcgaagacggcaacctggtcgtcgaaatcaagccactgaacttccttgaccgcgaaaacatcgacggccactccacccacgcattggcagcagcccttgcagtggcagactccaacgacgcaaccctctactggaacttccgcgcattcctcatggaagatcagtccgagatctacaaccagtggtccgatgatgacttcgcagacggcgttgaagcccttggcgcagactcctccgtagtagacgcaatccgaaacggcgacaacatccagcgcgcatacgacctggcaaccgcaaacggtgaagaactcactgaagaaaccggcagcctgtcctcaccacgcgtcctccaggacggcaaggatgttgaaggcaacatctccgactggatcaccactgttctagcttcttaaagaactgatctagaaggaaa

SEQ ID NO: 820 - protein, 222 aa, Corynebacterium glutamicum
MVAIVVVAIVVVGFIVIQGQGSKAAKLGDRDYEDTSLAMEVGSDSITLTSANTSADAKSVQLFEDFSCSHCSELSLATDADMKTQIEDGNLVVEIKPLNFLDRENIDGHSTHALAAALAVADSNDATLYWNFRAFLMEDQSEIYNQWSDDDFADGVEALGADSSVVDAIRNGDNIQRAYDLATANGEELTEETGSLSSPRVLQDGKDVEGNISDWITTVLAS

SEQ ID NO: 821 - DNA, 730 bp, Corynebacterium glutamicum
  CDS (101)..(730): FRXA01813
gcgagaattcaagaaaacaaaacagatcaaagtaaggcaacaagtgagcaacaaagttcagaatccgaaccaaggtggaagcaagaacttcctctgggcaatggtggcgatcgtcgtcgttgcaatcgtcgtcgtcggcttcatcgtcatccaaggccagggctcaaaagcagccaagcttggtgaccgcgactacgaagacacctctttggcaatggaagtaggctccgactccatcacgctgacctccgcaaacacctccgccgacgcaaagtccgtgcagctttttgaagacttctcctgctctcactgctccgagctctccctcgccaccgacgctgacatgaagactcagatcgaagacggcaacctggtcgtcgaaatcaagccactgaacttccttgaccgcgaaaacatcgacggccactccacccacgcattggcagcagcccttgcagtggcagactccaacgacgcaaccctctactggaacttccgcgcattcctcatggaagatcagtccgagatctacaaccagtggtccgatgatgacttcgcagacggcgttgaagcccttggcgcagactcctccgtagtagacgcaatccgaacggcgacaacatccagcgcgcatacgacctggcaaccgcaaacggtgaagaactcactgaagaaaccggcagcctgttcttaccacgcgttcttcaagacggcaaggatgttgaaggca

SEQ ID NO: 822 - protein, 210 aa, Corynebacterium glutamicum
MVAIVVVAIVVVGFIVIQGQGSKAAKLGDRDYEDTSLAMEVGSDSITLTSANTSADAKSVQLFEDFSCSHCSELSLATDADMKTQIEDGNLVVEIKPLNFLDRENIDGHSTHALAAALAVADSNDATLYWNFRAFLMEDQSEIYNQWSDDDFADGVEALGADSSVVDAIRTATTSSAHTTWQPQTVKNSLKKPAACSYHAFFKTARMLKA

SEQ ID NO: 823 - DNA, 915 bp, Corynebacterium glutamicum
  CDS (101)..(892): RXN01815
gaatgaaaagaagtggtggccgatgcttggctatctcagcctgacttttacacttggatattctgctgtttttctcgggatgcggctctagaattgtagaatgaatcgttcaacaatttccccagttgaagcccgccagcaattccgcgcaggccttatccaacccacctccggctggtccgcgggttttgcccaagccaacctcatttccatgccccaggatctggcttatgatttcctgctttttgctcaacgcaaccccaagccctgccccatcttggaagtattaaatgctggcgaaaccttcggcggaattttcggctcaaacgccaccgaagcagacatccgcaccgacgcgccccaataccgcatttacgcacacggcgaacttatcgattcccccgccagcgccgtcgattattggcgcgacgacctcgtcagtttcatcatcggctgctcctttacttttgaacatcccatggtccaagcaggcgttcccgtccgccacctcgaggccggccgcaacgtccccatgtatgaaacctcacttgcctgccgaccagccggttccctatcaggaaacctcgtggtgtcactgcgcatgatccccgcatcccaagtcgcggatgccgtccgcattacctcccgctaccccgcggttcacggagcaccagtccacatcggcgatccttcactgatcggaatcgatgacatcaacaaccctgatttcggcgatgccccgctgtccgaaccaagcgacgtccccgtgttttgggcctgcggagttacccctcaagcaatggtcatgtcctccaagccaccgctggcgatcactcacgcacccggacacatgctgatcaccgacgccccagatctgggattccaggttccttaaacctggatccaccgatgtga

SEQ ID NO: 824 - protein, 264 aa, Corynebacterium glutamicum
MNRSTISPVEARQQFRAGLIQPTSGWSAGFAQANLISMPQDLAYDFLLFAQRNPKPCPILEVLNAGETFGGIFGSNATEADIRTDAPQYRIYAHGELIDSPASAVDYWRDDLVSFIIGCSFTFEHPMVQAGVPVRHLEAGRNVPMYETSLACRPAGSLSGNLVVSLRMIPASQVADAVRITSRYPAVHGAPVHIGDPSLIGIDDINNPDFGDAPLSEPSDVPVFWACGVTPQAMVMSSKPPLAITHAPGHMLITDAPDLGFQVP

SEQ ID NO: 825 - DNA, 915 bp, Corynebacterium glutamicum; identical to SEQ ID NO: 823
  CDS (101)..(892): FRXA01815

SEQ ID NO: 826 - protein, 264 aa, Corynebacterium glutamicum; identical to SEQ ID NO: 824

SEQ ID NO: 827 - DNA, 393 bp, Corynebacterium glutamicum
  CDS (101)..(370): RXN01825
gtcaaggtagctggcccggcaactgatacgttaagctcaaacaagataagtaccagttgctggggtttttccaagacaataaattatgaaggtgtgaacaatgccaaaggcaagagtaactaaaaacgagaccgcaccggtttcaagcaacccaagcgcaaaccgcaccccggttaagatcaattccgccggaaccccaatgtggtacaaggtcatcatgtttgccttcatgatcgtcggcctagcctggttgatcattaactacctcgtgggcccacagatcccattcatggctgatcttggtgcatggaactatggcatcggcttcggtctgatgatcatcggcctactcatgaccatgggttggcgttaatccttcaaaaaagtgactgc

SEQ ID NO: 828 - protein, 90 aa, Corynebacterium glutamicum
MPKARVTKNETAPVSSNPSANRTPVKINSAGTPMWYKVIMFAFMIVGLAWLIINYLVGPQIPFMADLGAWNYGIGFGLMIIGLLMTMGWR

SEQ ID NO: 829 - DNA, 393 bp, Corynebacterium glutamicum; identical to SEQ ID NO: 827
  CDS (101)..(370): FRXA01825

SEQ ID NO: 830 - protein, 90 aa, Corynebacterium glutamicum; identical to SEQ ID NO: 828

SEQ ID NO: 831 - DNA, 585 bp, Corynebacterium glutamicum
  CDS (101)..(562): RXN01831
cctgtggataattggttgttggctgatggtgatgtcattacggtgggtcattccaatatcgaagttcgtattgttagtccctagagggagaggttgatcaatggattctctggtccttcttgggcttcgcatcgctttgcttgtggtgttgtggtttttcgtcttgatggcgctgcgcgctatgagggcagatttgaaagtgacgggtcaagcgtcgacaagcagctcctccgtcgcggcaccgcagggccttgcccgggcttttaatcgctccagcccgcctcgtcttttgacggtggtcgagggcccgttggcgggctcctcgattgaggtgtcggaggatatgacgatgggccgtagccctgagtgcacgtttgtggtgggcgatgattacgcctccggcatgcatgcgcgggtgtttaagcgtggttcggagtggtttgtggaggatctggattcgcgcaacggcacttttgtcggtggtacgcgcattgatcagcctgagcagattgcggtgggcacggatatccgtattggtcgtacagcagtgaggcttgttccctgatgttgaaacttaaatatgcg

SEQ ID NO: 832 - protein, 154 aa, Corynebacterium glutamicum
MDSLVLLGLRIALLVVLWFFVLMALRAMRADLKVTGQASTSSSSVAAPQGLARAFNRSSPPRLLTVVEGPLAGSSIEVSEDMTMGRSPECTFVVGDDYASGMHARVFKRGSEWFVEDLDSRNGTFVGGTRIDQPEQIAVGTDIRIGRTAVRLVP

SEQ ID NO: 833 - DNA, 585 bp, Corynebacterium glutamicum; identical to SEQ ID NO: 831
  CDS (101)..(562): FRXA01831

SEQ ID NO: 834 - protein, 154 aa, Corynebacterium glutamicum; identical to SEQ ID NO: 832

SEQ ID NO: 835 - DNA, 825 bp, Corynebacterium glutamicum
  CDS (101)..(802): RXN01834
actaagaacgtgagcttggtttcataataccccccagggtattgttagccaggtgattctagcccttcttggcggcctaataataggcctacttcttggcatgctcggtggtggcggtgccatccttgccattccgctgcttatttatggattttcttttagcgccacgcaagctactgcagcttcattaatcatcatcggacttggcgccctcattggactgatcagccaatacgctgccgggcacgtccgccttaaagagggtctaagctttggccttttagggttggtcggctcatttgtgggcagtcaccttgctagcaatatccccgattccctactcctgagcggctttgccatcctcacgctcgtggtggcgttgaccatgatttctaaattaagaagcacccgagaatacataaccagaaggccaagcatccttgccattgctcttagtgccaccggcgtgggatttttgacgggattttttggtgtgggtggcggttttgccattgtgccagccttgatttttgcgctcggtttttccatgcggcaggctagcgccacttccctagtggtgatcgccgttaacagcgctattgccatgggatttagatattccgatttggcaagtattgactggtcagtgatctcgccaattatcatcaccaccgtattgggcgcttttagtggcgtaaaactagccaaaaaggtcaaagcatcatcactgcaactaggttttgctggcttcttgatcttcatttcgatctatatgggatttcagaatttcccggaccttttttaaaacttcaaaatatacccccc

SEQ ID NO: 836 - protein, 234 aa, Corynebacterium glutamicum
MLGGGGAILAIPLLIYGFSFSATQATAASLIIIGLGALIGLISQYAAGHVRLKEGLSFGLLGLVGSFVGSHLASNIPDSLLLSGFAILTLVVALTMISKLRSTREYITRRPSILAIALSATGVGFLTGFFGVGGGFAIVPALIFALGFSMRQASATSLVVIAVNSAIAMGFRYSDLASIDWSVISPIIITTVLGAFSGVKLAKKVKASSLQLGFAGFLIFISIYMGFQNFPDLF

SEQ ID NO: 837 - DNA, 825 bp, Corynebacterium glutamicum; identical to SEQ ID NO: 835
  CDS (101)..(802): FRXA01834

SEQ ID NO: 838 - protein, 234 aa, Corynebacterium glutamicum; identical to SEQ ID NO: 836

SEQ ID NO: 839 - DNA, 382 bp, Corynebacterium glutamicum
  CDS (101)..(382): RXN01846
gtatttaggaattgaaacccactaaaaaacagactaagttactaggtgataacaaaagttgtttattacttatgggaatagtgtggaaagtagggtgaatatgtcaattcctggaaatgttagttatgttgcacagggtggcaccggttgggatggtgctgatcagtacaccacgggtgagagttgggatctacagtcgttccttgaaaactcgactgactacctcatgattattggtggttcgctgctggcacttgttggtggtgctgctgtgatttggggctttgtcaacgtgatgcgcaagctcttcggtggtcagagtggtcagcagattcagtggttcaccactattttgctcatcattgtcggtggtgcgttgcct

SEQ ID NO: 840 - protein, 94 aa, Corynebacterium glutamicum
MSIPGNVSYVAQGGTGWDGADQYTTGESWDLQSFLENSTDYLMIIGGSLLALVGGAAVIWGFVNVMRKLFGGQSGQQIQWFTTILLIIVGGALP

SEQ ID NO: 841 - DNA, 358 bp, Corynebacterium glutamicum
  CDS (101)..(358): FRXA01846
gtatttaggaattgaaacccactaaaaaacagactaagttactaggtgataacaaaagttgtttattacttatgggaatagtgtggaaagtagggtgaatatgtcaattcctggaaatgttagttatgttgcacagggtggcaccggttgggatggtgctgatcagtacaccacgggtgagagttgggatctacagtcgttccttgaaaactcgactgactacctcatgattattggtggttcgctgctggcacttgttggtggtgctgctgtgatttggggctttgtcaacgtgatgcgcaagctcttcggtggtcagagtggtcagcagattcagtggttcaccactattttgctc

SEQ ID NO: 842 - protein, 86 aa, Corynebacterium glutamicum
MSIPGNVSYVAQGGTGWDGADQYTTGESWDLQSFLENSTDYLMIIGGSLLALVGGAAVIWGFVNVMRKLFGGQSGQQIQWFTTILL

SEQ ID NO: 843 - DNA, 858 bp, Corynebacterium glutamicum
  CDS (101)..(835): RXN01847
gacgtgtgatcataggtgacaaatataccctctcaacttggcttcgactgccctgccccctcgatttaagaggcaaggcttttacagtatcctctcatgcatgcttattgtgttgcctccctcagaaactaagacccacggcggttcaggaaaacctctggattttcaccatttgagtttcccgtcgctcaccaaggcacgccaaacaatactcgctgacctgcaagctttggaggtagatgaggcgctgaaagttttgggcatttctgaaaagctccgccctgaggccgaatccaatcgcgcgctggagaccagccctacgatgcctgcgatttttcggtattccggagtgctttatgatgcgctcgacgctgcaacgctgccggagaaagcactggaacgcctcgccatcggctcggcacttttcggcgtcatccacgccaccgatccgatcccgcattaccgcctgtccggcggcacaaaactgcccaccaaaagcggcgagctgcccaccatgaaggcgcgttggggcacaagcatcagcgaagcgcttatcgacgtcaaccagctggtgattgatcttcgcagcgggacctaccaacagttgggtcgcgtaaaagacgccgtcacggtacgcgtggaatcagtcatggaggatggctcccgcaaagtagtcagccactttaacaaacactacaaaggtgaactcgcccgcgtgctcgcgctctctgaaaaagaagcacacaccgcagaggacgtaatgagcattgcgcaggctgcgggccttgtggtggaggaaaaccccaaccacaaggaaaccctcactctggttgtctaggcgttaatcaccattttgat

SEQ ID NO: 844 - protein, 245 aa, Corynebacterium glutamicum
MLIVLPPSETKTHGGSGKPLDFHHLSFPSLTKARQTILADLQALEVDEALKVLGISEKLRPEAESNRALETSPTMPAIFRYSGVLYDALDAATLPEKALERLAIGSALFGVIHATDPIPHYRLSGGTKLPTKSGELPTMKARWGTSISEALIDVNQLVIDLRSGTYQQLGRVKDAVTVRVESVMEDGSRKVVSHFNKHYKGELARVLALSEKEAHTAEDVMSIAQAAGLVVEENPNHKETLTLVV

SEQ ID NO: 845 - DNA, 809 bp, Corynebacterium glutamicum
  CDS (52)..(786): FRXA01847
gccctgccccctcgatttaagaggcaaggcttttacagtatcctctcatgcatgcttattgtgttgcctccctcagaaactaagacccacggcggttcaggaaaacctctggattttcaccatttgagtttcccgtcgctcaccaaggcacgccaaacaatactcgctgacctgcaagctttggaggtagatgaggcgctgaaagttttgggcatttctgaaaagctccgccctgaggccgaatccaatcgcgcgctggagaccagccctacgatgcctgcgatttttcggtattccggagtgctttatgatgcgctcgacgctgcaacgctgccggagaaagcactggaacgcctcgccatcggctcggcacttttcggcgtcatccacgccaccgatccgatcccgcattaccgcctgtccggcggcacaaaactgcccaccaaaagcggcgagctgcccaccatgaaggcgcgttggggcacaagcatcagcgaagcgcttatcgacgtcaaccagctggtgattgatcttcgcagcgggacctaccaacagttgggtcgcgtaaaagacgccgtcacggtacgcgtggaatcagtcatggaggatggctcccgcaaagtagtcagccactttaacaaacactacaaaggtgaactcgcccgcgtgctcgcgctctctgaaaaagaagcacacaccgcagaggacgtaatgagcattgcgcaggctgcgggccttgtggtggaggaaaaccccaaccacaaggaaaccctcactctggttgtctaggcgttaatcaccattttgat

SEQ ID NO: 846 - protein, 245 aa, Corynebacterium glutamicum; identical to SEQ ID NO: 844

SEQ ID NO: 847 - DNA, 448 bp, Corynebacterium glutamicum
  CDS (101)..(448): RXN01874
agtgtcggcgcgacgattgtgggcggtgctttggcgtggcacgcagcagtttggcatcacagttccggagcgcaaaacgcggtcagcctttcgcgtcgcagtgatcgcgtatgttgccagcgcgtgctgcctgccgtttggcgcatttgccggagcgttgttgtccaaggagctgtcgggacatctccaggaacgagtccttctcacccacacggtgattaattttctaggtttcgtgggatttgctgcgctcggttcgctgtcggtgctgttcgccgcgatttggcgcaccaaaattcgccacaatttcaccccgtggtctgtggggatcatggcggtgagcctgccgatcatcgtcacgggcatcctgctcaacaacggctatgtcgccgccacaggcctggccgcgtacgtggcagcatggttgctggccatggtggggtggggg

SEQ ID NO: 848 - protein, 116 aa, Corynebacterium glutamicum
VIAYVASACCLPFGAFAGALLSKELSGHLQERVLLTHTVINFLGFVGFAALGSLSVLFAAIWRTKIRHNFTPWSVGIMAVSLPIIVTGILLNNGYVAATGLAAYVAAWLLAMVGWG

SEQ ID NO: 849 - DNA, 448 bp, Corynebacterium glutamicum
  CDS (101)..(448): FRXA01874
agtgtcggcgcgacgattgtgggcggtgctttggcgtggcacgcagcagtttggcatcacagttccggagcgcaaaacgcggtcagcctttcgcgtcgcagtgatcgcgtatgttgccagcgcgtgctgcctgccgtttggcgcatttgccggagcgttgttgtccaaggagctgtcgggacatctccaggaacgagtccttctcacccacacggtgattaattttctaggtttcgtgggatttgctgcgctcggttcgctgtcggtgctgttcgccgcgatttggcgcaccaaaattcgccacaatttcaccccgtggtctgtggggatcatggcggtgagcctgccgatcatcgtcacgggcatcctgctcaacaacggctatgtcgccgcacaggcctggccgcgtacgtggcagcatggttgctggccatggtggggtggggga

SEQ ID NO: 850 - protein, 116 aa, Corynebacterium glutamicum
VIAYVASACCLPFGAFAGALLSKELSGHLQERVLLTHTVINFLGFVGFAALGSLSVLFAAIWRTKIRHNFTPWSVGIMAVSLPIIVTGILLNNGYVAAQAWPRTWQHGCWPWWGGG

SEQ ID NO: 851 - DNA, 969 bp, Corynebacterium glutamicum
  CDS (101)..(946): RXN01875
aatcctatccctaaaaagtttctaacaaaagtattgcacttactttttgatagtgctatcttcagttgtgtacttgaaacacacacgaatggagcaagaaatgcgtattgcagtaactggagcaacgggatctttgggtggacatgttgtggatagtcttctaaacaagggcgtcgcagcatcagacatcgttgccattgttcgaaatgaagaaaaggcagcagacctcaaagcccgtggaatcgctcttggtgtggctacttttgaagacgaagcggcactgactgcagctcttgaaggtgtggatcgccttgtgtttatctctggcagcgaagtggggcagcgcgttgcgcagcacaccaatgtcatcaatgccgctaaagcagctggcgtgacattcattgcatacaccagcttgctcaaccttggtacctcaaagcttgcacttgctccagagcacattgcaacggaaaagctcctggcagaaagcggcattgaccacgcgctgctgcgcaatggttggtactgggagaactacgaatcttcaattggcgcagcgaaggccaccgggaaggtattcggcgcagctgaaggcgcacgcgtttccgcagccgcacgtaaggactacgcagaggcagctgctgttgtcatcaccagcgacaaccaggcaggcaaggtctatgagctcgcaggcgcaccagctttgacctacccagagatcgcagctggcattggtgaggtcattggttctgaggcagaatacgtcaacctctccgtggaggagtaccaaaatgcgctggagcaggctggcgttccagctgaatttgcagcacttctcgcaggcatggatcccatcattgcagagggcgcgctgtactccgacagcaccgacctacaggatctcatcggacgcccgagcacctcaatcgttgaggccctgagctcataacctgctactcacctaaaatg

SEQ ID NO: 852 - protein, 282 aa, Corynebacterium glutamicum
MRIAVTGATGSLGGHVVDSLLNKGVAASDIVAIVRNEEKAADLKARGIALGVATFEDEAALTAALEGVDRLVFISGSEVGQRVAQHTNVINAAKAAGVTFIAYTSLLNLGTSKLALAPEHIATEKLLAESGIDHALLRNGWYWENYESSIGAAKATGKVFGAAEGARVSAAARKDYAEAAAVVITSDNQAGKVYELAGAPALTYPEIAAGIGEVIGSEAEYVNLSVEEYQNALEQAGVPAEFAALLAGMDPIIAEGALYSDSTDLQDLIGRPSTSIVEALSS

SEQ ID NO: 853 - DNA, 921 bp, Corynebacterium glutamicum
  CDS (101)..(898): FRXA01875
ctwkcktsrswtgtgtrsywgawwmmcwywcscagcatsrwgcwrgwwwyrmgkwktscasyaaacwggrgtcartcscggatctttgggtggacatgttgtggatagtcttctaaacaagggcgtcgcagcatcagacatcgttgccattgttcgaaatgaagaaaaggcagcagacctcaaagcccgtggaatcgctcttggtgtggctacttttgaagacgaagcggcactgactgcagctcttgaaggtgtggatcgccttgtgtttatctctggcagcgaagtggggcagcgcgttgcgcagcacaccaatgtcatcaatgccgctaaagcagctggcgtgacattcattgcatacaccagcttgctcaaccttggtacctcaaagcttgcacttgctccagagcacattgcaacggaaaagctcctggcagaaagcggcattgaccacgcgctgctgcgcaatggttggtactgggagaactacgaatcttcaattggcgcagcgaaggccaccgggaaggtattcggcgcagctgaaggcgcacgcgtttccgcagccgcacgtaaggactacgcagaggcagctgctgttgtcatcaccagcgacaaccaggcaggcaaggtctatgagctcgcaggcgcaccagctttgacctacccagagatcgcagctggcattggtgaggtcattggttctgaggcagaatacgtcaacctctccgtggaggagtaccaaaatgcgctggagcaggctggcgttccagctgaatttgcagcacttctcgcaggcatggatcccatcattgcagagggcgcgctgtactccgacagcaccgacctacaggatctcatcggacgcccgagcacctcaatcgttgaggccctgagctcataacctgctactcacctaaaatg

SEQ ID NO: 854 - protein, 266 aa, Corynebacterium glutamicum
VDSLLNKGVAASDIVAIVRNEEKAADLKARGIALGVATFEDEAALTAALEGVDRLVFISGSEVGQRVAQHTNVINAAKAAGVTFIAYTSLLNLGTSKLALAPEHIATEKLLAESGIDHALLRNGWYWENYESSIGAAKATGKVFGAAEGARVSAAARKDYAEAAAVVITSDNQAGKVYELAGAPALTYPEIAAGIGEVIGSEAEYVNLSVEEYQNALEQAGVPAEFAALLAGMDPIIAEGALYSDSTDLQDLIGRPSTSIVEALSS

SEQ ID NO: 855 - DNA, 484 bp, Corynebacterium glutamicum
  CDS (101)..(484): FRXA02734
aatcctatccctaaaaagtttctaacaaaagtattgcacttactttttgatagtgctatcttcagttgtgtacttgaaacacacacgaatggagcaagaaatgcgtattgcagtaactggagcaacgggatctttgggtggacatgttgtggatagtcttctaaacaagggcgtcgcagcatcagacatcgttgccattgttcgaaatgaagaaaaggcagcagacctcaaagcccgtggaatcgctcttggtgtggctacttttgaagacgaaacggcactgactgcagctcttgaaggtgtggatcgccttgtgtttatctctggcagcgaagtggggcagcgcgttgcgcaacacaccaatgtcatcaatgccgctaaagcaactggcgtgacattcattgcatacaccagcttgctcaaccttggtcctcaaagcttgcacttgctccagagcacattgcaaccggaaaagctcctggca

SEQ ID NO: 856 - protein, 128 aa, Corynebacterium glutamicum
MRIAVTGATGSLGGHVVDSLLNKGVAASDIVAIVRNEEKAADLKARGIALGVATFEDETALTAALEGVDRLVFISGSEVGQRVAQHTNVINAAKATGVTFIAYTSLLNLGPQSLHLLQSTLQPEKLLA

SEQ ID NO: 857 - DNA, 1194 bp, Corynebacterium glutamicum
  CDS (101)..(1171): RXN01877
gtacccgtattgtactaattgtaattccccggagagggaagaagtttacatggcgccccatcagaagtcagggatcaaccggatcaacagcacccgctcggtgccgttgcgtttggctaccggtggcgtgctcgccaccttgcttatcggcggagtcaccgctgcagctaccaaaaaggacatcattgttgatgtcaacggcgagcagatgtccctagtgactatgtccggcactgttgaaggtgtgctggcgcaagctggtgtggaacttggtgaccaggacattgtttccccttcactggattcatccatcagtgatgaagacactgtgactgttcgtactgccaagcaggtggcgctcgtggtggaaggtcaaatccaaaacgtgaccaccactgcggtttccgtggaggacctcctgcaggaagtcggtggcattaccggtgctgatgcggtggacgctgatctttcagagaccatcccagaatctggtttgaaggtgagtgttaccaagccgaagattatttccatcaatgatggtggcaaggtcacttacgtttctttggcagctcagaacgtacaggaagccctagagctgcgggatattgagctgggtgctcaggaccgcattaatgtgcctctggatcagcagctgaagaacaacgctgcgatccagatcgaccgcgttgacaacaccgaaatcactgaaactgtgtctttcgatgctgagccaacctacgtggatgatccagaagctccagctggcgatgaaactgtggtcgaagaaggcgctcctggaaccaaggaagttactcgcaccgtaacaaccgttaatggtcaggaagaatcttccacggtgatcaatgaagttgaaatcaccgcagcaaagccagcaaccattagccgtggcaccaaaactgtcgctgcaaactccgtgtgggatcagctggcacagtgtgaatccggcggaaactgggcaatcaacacaggtaatggcttctccggcggcctacagttccacccacagacctggctcgcatacggtggtggagctttctccggtgacgcttccggtgcaagccgtgaacagcaaatctccatcgcagaaaaggttcaggctgcacaaggttggggagcatggcctgcttgcaccgcaagcttgggcatccgatagtagaaatctggcatccaata

SEQ ID NO: 858 - protein, 357 aa, Corynebacterium glutamicum
VPLRLATGGVLATLLIGGVTAAATKKDIIVDVNGEQMSLVTMSGTVEGVLAQAGVELGDQDIVSPSLDSSISDEDTVTVRTAKQVALVVEGQIQNVTTTAVSVEDLLQEVGGITGADAVDADLSETIPESGLKVSVTKPKIISINDGGKVTYVSLAAQNVQEALELRDIELGAQDRINVPLDQQLKNNAAIQIDRVDNTEITETVSFDAEPTYVDDPEAPAGDETVVEEGAPGTKEVTRTVTTVNGQEESSTVINEVEITAAKPATISRGTKTVAANSVWDQLAQCESGGNWAINTGNGFSGGLQFHPQTWLAYGGGAFSGDASGASREQQISIAEKVQAAQGWGAWPACTASLGIR

SEQ ID NO: 859 - DNA, 1188 bp, Corynebacterium glutamicum
  CDS (101)..(1165): FRXA01877
gtattgtactaattgtaattccccggagagggaagaagtttacatggcgccccatcagaagtcagggatcaaccggatcaacagcacccgctcggtgccgttgcgtttggctaccggtggcgtgctcgccaccttgcttatcggcggagtcaccgctgcagctaccaaaaaggacatcattgttgatgtcaacggcgagcagatgtccctagtgactatgtccggcactgttgaaggtgtgctggcgcaagctggtgtggaacttggtgaccaggacattgtttccccttcactggattcatccatcagtgatgaagacactgtgactgttcgtactgccaagcaggtggcgctcgtggtggaaggtcaaatccaaaacgtgaccaccactgcggtttccgtggaggacctcctgcaggaagtcggtggcattaccggtgctgatgcggtggacgctgatctttcagagaccatcccagaatctggtttgaaggtgagtgttaccaagccgaagattatttccatcaatgatggtggcaaggtcacttacgtttctttggcagctcagaacgtacaggaagccctagagctgcgggatattgagctgggtgctcaggaccgcattaatgtgcctctggatcagcagctgaagaacaacgctgcgatccagatcgaccgcgttgacaacaccgaaatcactgaaactgtgtctttcgatgctgagccaacctacgtggatgatccagaagctccagctggcgatgaaactgtggtcgaagaaggcgctcctggaaccaaggaagttactcgcaccgtaacaaccgttaatggtcaggaagaatcttccacggtgatcaatgaagttgaaatcaccgcagcaaagccagcaaccattagccgtggcaccaaaactgtcgctgcaaactccgtgtgggatcagctggcacagtgtgaatccggcggaaactgggcaatcaacacaggtaatggcttctccggcggcctacagttccacccacagacctggctcgcatacggtggtggagctttctccggtgacgcttccggtgcaagccgtgaacagcaaatctccatcgcagaaaaggttcaggctgcacaaggttggggagcatggcctgcttgcaccgcaagcttgggcatccgatagtagaaatctggcatccaata

SEQ ID NO: 860 - protein, 355 aa, Corynebacterium glutamicum
LRLATGGVLATLLIGGVTAAATKKDIIVDVNGEQMSLVTMSGTVEGVLAQAGVELGDQDIVSPSLDSSISDEDTVTVRTAKQVALVVEGQIQNVTTTAVSVEDLLQEVGGITGADAVDADLSETIPESGLKVSVTKPKIISINDGGKVTYVSLAAQNVQEALELRDIELGAQDRINVPLDQQLKNNAAIQIDRVDNTEITETVSFDAEPTYVDDPEAPAGDETVVEEGAPGTKEVTRTVTTVNGQEESSTVINEVEITAAKPATISRGTKTVAANSVWDQLAQCESGGNWAINTGNGFSGGLQFHPQTWLAYGGGAFSGDASGASREQQISIAEKVQAAQGWGAWPACTASLGIR

SEQ ID NO: 861 - DNA, 1056 bp, Corynebacterium glutamicum
  CDS (101)..(1033): RXN01879
ctttgcgggccgctgatattgatccaacgcttcgtggcgaaaagcttgatgtcactgactatgtgcgcctagctggggtgttgcagcaaaaggatgagaagtgaaaattaccgctaaggcgtgggcgaaaaccaacctgcatttaggtgtgggaccggctcacgacgatggatttcacgagctcatgacggtgtttcaaaccattgatctgtttgacaccgtcaccttaaccaccctcgatgaggagttggtggaggaggggagcgtcgtcaagcaattatctgtgaccggtgcccgtggcgtgcctgaggacgccagcaatcttgcgtggcgcgctgtggatgcgttggttaagcggcgcgcggaaaagacgccgctgtctgcagtttcgctgcatatttccaaggggattccggtggctggcggcatggctggcggctctgcggatgcggctgcgacactgcgcgcagtggatgcctggattgggcctttcggcgaggacacattgctggaggttgccgcggagctcggctcagatgtgccgttttgcctgcttggtggcaccatgcgcggtaccggtcgcggcgagcagctggtagatatgttgacgcgcggcaagctacattgggtggtggccgcgatggcgcatggcctgtccacgcctgaggtattcaaaaagcatgatgagctgaatccggaatcgcatatggatatcagcgacctcagcgccgcacttctcaccggcaacaccgccgaggtggggcagtggctgcacaatgatctgaccagcgccgcactcagtttgcgccctgaactgcgcagcgtcctccaagaaggcatccgctccggcgcgcatgcaggaattgtctccggctccggcccgaccacggtattcttgtgcgaatcggagcacaaagcgcaagacgttaaagaggcgctaatcgacgccggccaggtgtacgctgcttacaccgccaccggccctgcggcctcaaccgccgaccagcgcggcgcacacattttgactgtttcataataaagacaaacttaagtatc

SEQ ID NO: 862 - protein, 311 aa, Corynebacterium glutamicum
VKITAKAWAKTNLHLGVGPAHDDGFHELMTVFQTIDLFDTVTLTTLDEELVEEGSVVKQLSVTGARGVPEDASNLAWRAVDALVKRRAEKTPLSAVSLHISKGIPVAGGMAGGSADAAATLRAVDAWIGPFGEDTLLEVAAELGSDVPFCLLGGTMRGTGRGEQLVDMLTRGKLHWVVAAMAHGLSTPEVFKKHDELNPESHMDISDLSAALLTGNTAEVGQWLHNDLTSAALSLRPELRSVLQEGIRSGAHAGIVSGSGPTTVFLCESEHKAQDVKEALIDAGQVYAAYTATGPAASTADQRGAHILTVS

SEQ ID NO: 863 - DNA, 711 bp, Corynebacterium glutamicum
  CDS (101)..(688): FRXA01879
ctttgcgggccgctgatattgatccaacgcttcgtggcgaaaagcttgatgtcactgactatgtgcgcctagctggggtgttgcagcaaaaggatgagaagtgaaaattaccgctaaggcgtgggcgaaaaccaacctgcatttaggtgtgggaccggctcacgacgatggatttcacgagctcatgacggtgtttcaaaccattgatctgtttgacaccgtcaccttaaccaccctcgatgaggagttggtggaggaggggagcgtcgtcaagcaattatctgtgaccggtgcccgtggcgtgcctgaggacgccagcaatcttgcgtggcgcgctgtggatgcgttggttaagcggcgcgcggaaaagacgccgctgtctgcagtttcgctgcatatttccaaggggattccggtggctggcggcatggctggcggctctgcggatgcggctgcgacactgcgcgcagtggatgcctggattgggcctttcggcgaggacacattgctggaggttgccgcggagctcggctcagatgtgccgttttgcctgcttggtggcaccatgcgcggtaccggtcgcggcgagcagctggtagatatgttgacgcgcggcaagctacattgggtggtggccgcgatggcgcatggcctgtccaccctgaggtattcaaaaagcatgatgagctgaatccggaatcgcatatggat

SEQ ID NO: 864 - protein, 196 aa, Corynebacterium glutamicum
VKITAKAWAKTNLHLGVGPAHDDGFHELMTVFQTIDLFDTVTLTTLDEELVEEGSVVKQLSVTGARGVPEDASNLAWRAVDALVKRRAEKTPLSAVSLHISKGIPVAGGMAGGSADAAATLRAVDAWIGPFGEDTLLEVAAELGSDVPFCLLGGTMRGTGRGEQLVDMLTRGKLHWVVAAMAHGLSTLRYSKSMMS

SEQ ID NO: 865 - DNA, 531 bp, Corynebacterium glutamicum
  CDS (101)..(508): FRXA01880
agctcggctcagatgtgccgttttgcctgcttggtggcaccatgcgcggtaccggtcgcggcgagcagctggtagatatgttgacgcgcggcaagctacattgggtggtggccgcgatggcgcatggcctgtccaccctgaggtattcaaaaagcatgatgagctgaatccggaatcgcatatggatatcagcgacctcagcgccgcacttctcaccggcaacaccgccgaggtggggcagtggctgcacaatgatctgaccagcgccgcactcagtttgcgccctgaactgcgcagcgtcctccaagaaggcatccgctccggcgcgcatgcaggaattgtctccggctccggcccgaccacggtattcttgtgcgaatcggagcacaaagcgcaagacgttaaagaggcgctaatcgacgccggccaggtgtacgctgcttacaccgccaccggccctgcggcctcaaccgccgaccagcgcggcgcacacattttgactgtttcataataaagacaaacttaagtatc

SEQ ID NO: 866 - protein, 136 aa, Corynebacterium glutamicum
LGGGRDGAWPVHPEVFKKHDELNPESHMDISDLSAALLTGNTAEVGQWLHNDLTSAALSLRPELRSVLQEGIRSGAHAGIVSGSGPTTVFLCESEHKAQDVKEALIDAGQVYAAYTATGPAASTADQRGAHILTVS

SEQ ID NO: 867 - DNA, 759 bp, Corynebacterium glutamicum
  CDS (101)..(736): RXN01896
ttattgggcagctcttttggaccgcgaagtcacccccgagctgcgccacagcattgcttattggatccgcgcgaaccacatcaaacgctagagtgattccatgacgcatgcgatcctctttgacctcgacggcaccctcgttgatcacgcttccgccgcccgcgccgccctgcacgcctggtcgccgaccgtgggcgtcgacacggatgttgagcgctggattgagctggataagtggggttttgcccgttttgagcgcggcgaaaccacgcatttaggtcagcggcgcgaccgcatcagggcgtacctcaacagagagcttgacgacgccacctgcgatgatatttactccggctaccttaaagcatatgagcaaaactggactgcctaccccgatgccaagggcgttctcgatcgcgcggtagccaccggtgcccctgtgggaatcctgaccaatggcgcagcccccatgcagcaagacaagcttgatcgcaccggccttggcctgccagaactcgtcatgttggcggcgtccactctggattctgcgaagcctcgccccgaaatgtatgcccgagcgctcacccatttgggtgcccgaaccgcaacaattatcggcgatgattggaccaacgatgtcgcagctccccgcgaacttggctggaatgctctctatttagatcgttccggaaccgatccacgcgccgatatccactccctggatgaactctttcactaggctggcctttattgtttccg

SEQ ID NO: 868 - protein, 212 aa, Corynebacterium glutamicum
MTHAILFDLDGTLVDHASAARAALHAWSPTVGVDTDVERWIELDKWGFARFERGETTHLGQRRDRIRAYLNRELDDATCDDIYSGYLKAYEQNWTAYPDAKGVLDRAVATGAPVGILTNGAAPMQQDKLDRTGLGLPELVMLAASTLDSAKPRPEMYARALTHLGARTATIIGDDWTNDVAAPRELGWNALYLDRSGTDPRADIHSLDELFH

SEQ ID NO: 869 - DNA, 602 bp, Corynebacterium glutamicum
  CDS (1)..(579): FRXA01896
gcccgcgccgccctgcacgcctggtcgccgaccgtgggcgtcgacacggatgttgagcgctggattgagctggataagtggggttttgcccgttttgagcgcggcgaaaccacgcatttaggtcagcggcgcgaccgcatcagggcgtacctcaacagagagcttgacgacgccacctgcgatgatatttactccggctaccttaaagcatatgagcaaaactggactgcctaccccgatgccaagggcgttctcgatcgcgcggtagccaccggtgcccctgtgggaatcctgaccaatggcgcagcccccatgcagcaagacaagcttgatcgcaccggccttggcctgccagaactcgtcatgttggcggcgtccactctggattctgcgaagcctcgccccgaaatgtatgcccgagcgctcacccatttgggtgcccgaaccgcaacaattatcggcgatgattggaccaacgatgtcgcagctccccgcgaacttggctggaatgctctctatttagatcgttccggaaccgatccacgcgccgatatccactccctggatgaactctttcactaggctggcctttattgtttccg

SEQ ID NO: 870 - protein, 193 aa, Corynebacterium glutamicum
ARAALHAWSPTVGVDTDVERWIELDKWGFARFERGETTHLGQRRDRIRAYLNRELDDATCDDIYSGYLKAYEQNWTAYPDAKGVLDRAVATGAPVGILTNGAAPMQQDKLDRTGLGLPELVMLAASTLDSAKPRPEMYARALTHLGARTATIIGDDWTNDVAAPRELGWNALYLDRSGTDPRADIHSLDELFH

SEQ ID NO: 871 - DNA, 909 bp, Corynebacterium glutamicum
  CDS (101)..(886): RXN01899
cctcgcagcacttcgcgcaggcgaatccacagtggccgcaaccttgatcaaagaacacatcgaaggctactacgaagaaaccgctgccgccgaggcctaaatgtcccgcactctgtgggcggtttcagatctacacgtcaccttcgcccaaaaccaaaacaccgttgatgccctcatgccgcaggaccccggcgactggctgatcgtcgctggcgatgtagcagagaaaatccccgatgtggtacgtaccttatccgcgctggtcaaacgctttgacaccgtgatttgggtgccgggcaaccacgaactcttcaaccggaaaacagaccgcgtcaacggcaaagcccgctaccgagcattagtcggacaactccgagccatcggcgtgatcacccccgaagatccctatccgatctttggtggcgtcaccatctgcccacttttcacactttacgattactctttccgtcccctcggcctcaccgcgaaacaagccctcgcccaagcaaaaataaagctagacgacgaactagccatcgccccctacgtagacatccccgcctggtgcgccgaacgagtcacctacacagaagaccgcctaaaagccaccaaaggcccaaaagtcctggtcaatcactggccgctggtcattgagcccacccaccggctcttccaaaaagacatcgcgctgtggtgtggaaccaccgccaccagggattgggccgtacgattcaacgctctcatggccattcacggtcacctacatattcctgccgaaacccgcgttgatggggtaagccacgtggaggtttctttgggttacccctttgaaaaacacccacctcacatgaagcgtccgtggccgtttccggtcatgcagattaactaactctgttgcttaaatggggg

SEQ ID NO: 872 - protein, 262 aa, Corynebacterium glutamicum
MSRTLWAVSDLHVTFAQNQNTVDALMPQDPGDWLIVAGDVAEKIPDVVRTLSALVKRFDTVIWVPGNHELFNRKTDRVNGKARYRALVGQLRAIGVITPEDPYPIFGGVTICPLFTLYDYSFRPLGLTAKQALAQAKIKLDDELAIAPYVDIPAWCAERVTYTEDRLKATKGPKVLVNHWPLVIEPTHRLFQKDIALWCGTTATRDWAVRFNALMAIHGHLHIPAETRVDGVSHVEVSLGYPFEKHPPHMKRPWPFPVMQIN

SEQ ID NO: 873 - DNA, 909 bp, Corynebacterium glutamicum; identical to SEQ ID NO: 871
  CDS (101)..(886): FRXA01899

SEQ ID NO: 874 - protein, 262 aa, Corynebacterium glutamicum; identical to SEQ ID NO: 872

SEQ ID NO: 875 - DNA, 1182 bp, Corynebacterium glutamicum
  CDS (101)..(1159): RXN01902
ggctggtccgaagtgcaaaccttcaacaccggcacctacggtgacaactggaacttcctcttcttcggcgacacccagctgtacaacacccactccaaccgtgcagaagaagtccagaactgggcaaacaacctggaacggcggcccaccaatcgaaaacccaggaacctccttcatcctctccgcgggtgatcaggcaaaccactccagctgggacgagcactccgcatacatctccccagaaaccctgcgcaactaccgtctggccgtgaacaatggaaaccacgaccagtacaactacgacgcctacaacgcgatgtacccacgccctaaccaggtcgatgagaactacttcttcgagtacaacaatgcactcttcctgtccctggactccaacgactacttggacatcgacgacgacatcgcattccttcgcgacaccgtcgcagcacacggtgacgacaaggactggatcgtcctgacctaccaccattccactttctcccaggcctaccacatggatgacgctcgcattaagtaccagcgcgaacgcctcaccccagtgatctctgaactgaacgttgacttggttctcggtggacacgaccacatctacacccgctcccacctgatgaacggcttcaccccagtcgatgcaggccgcgaagcagttgtcggtgaaactctgaaccctaaggccggcgaagttgtttaccttgcaaccaactcttcctcaggctccaagttctacgacttctacgacttccagctcggccagcgttacgacaccggactggatttccaggaaaccgtcgatcagaagaagatccgcacctacaccgcagtctggaaccaggaccaggttcaggactacaccaacgttgaactgaccccagaaggcctgactgtgaccactaaggacgcagtctccggcgagctggttgaccagttcaccctgagcaagcaggaccgcgacgaagaatctgaagtcccagttgaagatgacaaggacggagacaacgcgaccggctcctccaaccttggtctagctgctatcttggctccagttctggccatcttcggtttcgtcggtggactctttgttggcggcggctccctcgctgagttctttgccaacctcggcgtgaagatgcctttctaatactgtctgagattcaagca

SEQ ID NO: 876 - protein, 353 aa, Corynebacterium glutamicum
VQKKSRTGQTTWNGGPPIENPGTSFILSAGDQANHSSWDEHSAYISPETLRNYRLAVNNGNHDQYNYDAYNAMYPRPNQVDENYFFEYNNALFLSLDSNDYLDIDDDIAFLRDTVAAHGDDKDWIVLTYHHSTFSQAYHMDDARIKYQRERLTPVISELNVDLVLGGHDHIYTRSHLMNGFTPVDAGREAVVGETLNPKAGEVVYLATNSSSGSKFYDFYDFQLGQRYDTGLDFQETVDQKKIRTYTAVWNQDQVQDYTNVELTPEGLTVTTKDAVSGELVDQFTLSKQDRDEESEVPVEDDKDGDNATGSSNLGLAAILAPVLAIFGFVGGLFVGGGSLAEFFANLGVKMPF

SEQ ID NO: 877 - DNA, 887 bp, Corynebacterium glutamicum
  CDS (1)..(864): FRXA01902
aactacgacgcctacaacgcgatgtacccacgccctaaccaggtcgatgagaactacttcttcgagtacaacaatgcactcttcctgtccctggactccaacgactacttggacatcgacgacgacatcgcattccttcgcgacaccgtcgcagcacacggtgacgacaaggactggatcgtcctgacctaccaccattccactttctcccaggcctaccacatggatgacgctcgcattaagtaccagcgcgaacgcctcaccccagtgatctctgaactgaacgttgacttggttctcggtggacacgaccacatctacacccgctcccacctgatgaacggcttcaccccagtcgatgcaggccgcgaagcagttgtcggtgaaactctgaaccctaaggccggcgaagttgtttaccttgcaaccaactcttcctcaggctccaagttctacgacttctacgacttccagctcggccagcgttacgacaccggactggatttccaggaaaccgtcgatcagaagaagatccgcacctacaccgcagtctggaaccaggaccaggttcaggactacaccaacgttgaactgaccccagaaggcctgactgtgaccactaaggacgcagtctccggcgagctggttgaccagttcaccctgagcaagcaggaccgcgacgaagaatctgaagtcccagttgaagatgacaaggacggagacaacgcgaccggctcctccaaccttggtctagctgctatcttggctccagttctggccatcttcggtttcgtcggtggactctttgttggcggcggctccctcgctgagttctttgccaacctcggcgtgaagatgcctttctaatactgtctgagattcaagca

SEQ ID NO: 878 - protein, 288 aa, Corynebacterium glutamicum
NYDAYNAMYPRPNQVDENYFFEYNNALFLSLDSNDYLDIDDDIAFLRDTVAAHGDDKDWIVLTYHHSTFSQAYHMDDARIKYQRERLTPVISELNVDLVLGGHDHIYTRSHLMNGFTPVDAGREAVVGETLNPKAGEVVYLATNSSSGSKFYDFYDFQLGQRYDTGLDFQETVDQKKIRTYTAVWNQDQVQDYTNVELTPEGLTVTTKDAVSGELVDQFTLSKQDRDEESEVPVEDDKDGDNATGSSNLGLAAILAPVLAIFGFVGGLFVGGGSLAEFFANLGVKMPF

SEQ ID NO: 879 - DNA, 969 bp, Corynebacterium glutamicum
  CDS (101)..(946): RXN01908
tccacgacatctgacacagaaagaagattcaccatgtctaagaacaacgcagctcacccgcagtctgtcttccatatttcatatcccagcacataccactatgcactctgaccgctttgagcacccagacaacggctatggctacaccattcgtcaggacactgatgcagagaacccgatgacccatcacgatacgaaagatgcagctctctgggttcacaaccgaccacgacgcggagataccgtcgccgataagccagaaggcaatgagattctcgacatctttgccaagttcatctgcggccagcacgataatgatgacaacccgttcgaagtctggtccgacggtgactcggatgcatcactcatccgcaccaaggcgtatgttgccgagcaccaccccgaacttatattcgacatctctgcgaaaaccatcacgggttattcccaaggcgattggctcgatgtggtctgtgttactactgccgccacttgcgacgaacttatccctgctgacagtcttattgacatctaccgccagtgggcttttggtgatgtgtggacagtgattcctgattctcagccaggtctcgcaggtatttatgctgacgatccagctgacgcccttgcgtactatcaagagaatttcgaagatgaacccatctgggatctcttaagccgccacgacgctgacaaagacgccgcagcactggcagctgcctctgctgcagaaaaccacgcactagcgcgaggtactaccccagtcgttatccgtacccaagacatcatcactaacgcgcgatacctcatgtctgatagtgctgatgacaatccagaatacgatcgcgccttggtcgaacttagtgcttatctcttaagtatcgacctcgatgatcgcgttgctgcagagatgaccattttaggtcgccctgtgcctaaagaaggataaccaccacaccagaaaagaag

SEQ ID NO: 880 - protein, 282 aa, Corynebacterium glutamicum
MHSDRFEHPDNGYGYTIRQDTDAENPMTHHDTKDAALWVHNRPRRGDTVADKPEGNEILDIFAKFICGQHDNDDNPFEVWSDGDSDASLIRTKAYVAEHHPELIFDISAKTITGYSQGDWLDVVCVTTAATCDELIPADSLIDIYRQWAFGDVWTVIPDSQPGLAGIYADDPADALAYYQENFEDEPIWDLLSRHDADKDAAALAAASAAENHALARGTTPVVIRTQDIITNARYLMSDSADDNPEYDRALVELSAYLLSIDLDDRVAAEMTILGRPVPKEG

SEQ ID NO: 881 - DNA, 583 bp, Corynebacterium glutamicum
  CDS (101)..(583): FRXA01908
tccacgacatctgacacagaaagaagattcaccatgtctaagaacaacgcagctcacccgcagtctgtcttccatatttcatatcccagcacataccactatgcactctgaccgctttgagcacccagacaacggctatggctacaccattcgtcaggacactgatgcagagaacccgatgacccatcacgatacgaaagatgcagctctctgggttcacaaccgaccacgacgcggagataccgtcgccgataagccagaaggcaatgagattctcgacatctttgccaagttcatctgcggccagcacgataatgatgacaacccgttcgaagtctggtccgacggtgactcggatgcatcactcatccgcaccaaggcgtatgttgccgagcaccaccccgaacttatattcgacatctctgcgaaaaccatcacgggttattcccaaggcgattggctcgatgtggtctgtgttactactgccgccacttgcgacgaacttatccctgctgacagtcttattgacatctaccgccagtgggcttttggtgatgtgtggacagtgattcctgattctcag

SEQ ID NO: 882 - protein, 161 aa, Corynebacterium glutamicum
MHSDRFEHPDNGYGYTIRQDTDAENPMTHHDTKDAALWVHNRPRRGDTVADKPEGNEILDIFAKFICGQHDNDDNPFEVWSDGDSDASLIRTKAYVAEHHPELIFDISAKTITGYSQGDWLDVVCVTTAATCDELIPADSLIDIYRQWAFGDVWTVIPDSQ

SEQ ID NO: 883 - DNA, 970 bp, Corynebacterium glutamicum
  CDS (69)..(947): RXN01909
ttaataagaattgttctgggaagtaatataaaaagtcccgaacaaattagtgtgaaagggtttgtatcatggctaattttcgaagcaaggataaagatggcaatgtcatcaatccgaacgcgtctactaaaggtgtagatcttgttgtcaacgtctacgacagcgccaagcatgtgaccgaaaagggtaacactgtccactttgtggatgttcaggtagcgcaaattccgattgacgctgacggcactcgtgcgaatgcgaatcttgcaccacagactatgcctcatctgcatcttgacactaaggacggtcagcgcaacacaggtgttgcgtattctgatgcgcagattcaagcgatgcagacggtggcagcacaggggcgcaaccatatgaccccgctcttgagcaaagacggtgagacagttggttactccatgttggtcaaggctgatgtcatgttcccgaagaccaaggacggcaagtctctccctgcggtcatgaacactaagtctctgcagccatctggggttcctatttcggacgcgatgaatattcagcagcagcagtttatggctgtggcaatgaatcgccaagcagcagaagcgcagaaggctgcacaagcccaagcgacccaggctcaagcaccacaggtggcaccgcagccagttatgcagaatcagcaattccaggcaccagtgccacagggccagcagccagcatatgcaggagcccctgtctatgcagacgcggtagctcatgcaaccgcgcagcagcaggcagcagcagctcaggcaccgcaggcacctgctgggaatccgtttaaccagccgccagcagtagcagcagctctggcaccgcagacgcagccgccagcagtagcagcagctctggcaccgcagacgcagcagccggcagcacaacctcagatggataacgagccaccgttttaaaggcgcaatacaccacaccc

SEQ ID NO: 884 - protein, 293 aa, Corynebacterium glutamicum
MANFRSKDKDGNVINPNASTKGVDLVVNVYDSAKHVTEKGNTVHFVDVQVAQIPIDADGTRANANLAPQTMPHLHLDTKDGQRNTGVAYSDAQIQAMQTVAAQGRNHMTPLLSKDGETVGYSMLVKADVMFPKTKDGKSLPAVMNTKSLQPSGVPISDAMNIQQQQFMAVAMNRQAAEAQKAAQAQATQAQAPQVAPQPVMQNQQFQAPVPQGQQPAYAGAPVYADAVAHATAQQQAAAAQAPQAPAGNPFNQPPAVAAALAPQTQPPAVAAALAPQTQQPAAQPQMDNEPPF

SEQ ID NO: 885 - DNA, 960 bp, Corynebacterium glutamicum
  CDS (59)..(937): FRXA01909
ttgttctgggaagtaatataaaaagtcccgaacaaattagtgtgaaagggtttgtatcatggctaattttcgaagcaaggataaagatggcaatgtcatcaatccgaacgcgtctactaaaggtgtagatcttgttgtcaacgtctacgacagcgccaagcatgtgaccgaaaagggtaacactgtccactttgtggatgttcaggtagcgcaaattccgattgacgctgacggcactcgtgcgaatgcgaatcttgcaccacagactatgcctcatctgcatcttgacactaaggacggtcagcgcaacacaggtgttgcgtattctgatgcgcagattcaagcgatgcagacggtggcagcacaggggcgcaaccatatgaccccgctcttgagcaaagacggtgagacagttggttactccatgttggtcaaggctgatgtcatgttcccgaagaccaaggacggcaagtctctccctgcggtcatgaacactaagtctctgcagccatctggggttcctatttcggacgcgatgaatattcagcagcagcagtttatggctgtggcaatgaatcgccaagcagcagaagcgcagaaggctgcacaagcccaagcgacccaggctcaagcaccacaggtggcaccgcagccagttatgcagaatcagcaattccaggcaccagtgccacagggccagcagccagcatatgcaggagcccctgtctatgcagacgcggtagctcatgcaaccgcgcagcagcaggcagcagcagctcaggcaccgcaggcacctgctgggaatccgtttaaccagccgccagcagtagcagcagctctggcaccgcagacgcagccgccagcagtagcagcagctctggcaccgcagacgcagcagccggcagcacaacctcagatggataacgagccaccgttttaaaggcgcaatacaccacaccc

SEQ ID NO: 886 - protein, 293 aa, Corynebacterium glutamicum; identical to SEQ ID NO: 884

SEQ ID NO: 887 - DNA, 969 bp, Corynebacterium glutamicum
  CDS (101)..(946): RXN01910
caccgttttaaaggcgcaatacaccacaccccaacaaactttttgattgttggggtgtttgtctcagatcatgaacagcacaatgtaggagaagattgatatggcatttccgcttctagcggttgctggcacagttgcccccgttgcagcaggatgggcaaaagataagtttctcagcaactctcagaataatcagcaggcccagaatcagcagatgagttttggacaggtcaacaacagcgcacagaattctggatcagaaaacagcggtttcatgggtcaatacggcaatctgggtgcaggtttggcaggtgctgctacaggcgcagggcttgcgtatagcgattttgaagatggtcaaagtttgtcctcgaaggcccgcaacatggtcggcaaagggctcgctggtgccggagctggtgtgttcaccaagcttgccaatgatgcaattcaggccgagggtggctcgatgaaggctagtgcttattctgccattgcaggcggcttgggatcgtatctcaaagacggcggtccgggtgtgattaaatccgcgatggccagcggtgcagccggttttggtgcggataaagtgcacgataaattagctgagtctggtcatgaggggttggctgattccttgtcgggcgctattcaaggaggtggtcttggttactccacgcttggcggtgtcactggtgctggtattggcggtgcgacgggcggtctcgcaggactagcacaaaactactttggtggtggcgatgactacagcaacgctggggcatctgcatcggggtttagtgccaaccaggttaatagtgagatcagcaccgagattccgcagtttgcgaatcttggtcaaccacagcgatccgagcttgaacaattagcgctacctcaagaatcacggtctgtagataagagctacgaccaaggctacgaagcgtaagcgctttataacaaccccgt

SEQ ID NO: 888 - protein, 282 aa, Corynebacterium glutamicum
MAFPLLAVAGTVAPVAAGWAKDKFLSNSQNNQQAQNQQMSFGQVNNSAQNSGSENSGFMGQYGNLGAGLAGAATGAGLAYSDFEDGQSLSSKARNMVGKGLAGAGAGVFTKLANDAIQAEGGSMKASAYSAIAGGLGSYLKDGGPGVIKSAMASGAAGFGADKVHDKLAESGHEGLADSLSGAIQGGGLGYSTLGGVTGAGIGGATGGLAGLAQNYFGGGDDYSNAGASASGFSANQVNSEISTEIPQFANLGQPQRSELEQLALPQESRSVDKSYDQGYEA

SEQ ID NO: 889 - DNA, 969 bp, Corynebacterium glutamicum
  CDS (101)..(946): FRXA01910
caccgttttaaaggcgcaatacaccacaccccaacaaactttttgattgttggggtgtttgtctcagatcatgaacagcacaatgtaggagaagattgatatggcatttccgcttctagcggttgctggcacagttgcccccgttgcagcaggatgggcaaaagataagtttctcagcaactctcagaataatcagcaggcccagaatcagcagatgagttttggacaggtcaacaacagcgcacagaattctggatcagaaaacagcggtttcatgggtcaatacggcaatctgggtgcaggtttggcaggtgctgctacaggcgcagggcttgcgtatagcgattttgaagatggtcaaagtttgtcctcgaaggcccgcaacatggtcggcaaagggctcgctggtgccggagctggtgtgttcaccaagcttgccaatgatgcaattcaggccgagggtggctcgatgaaggctagtgcttattctgccattgcaagcggcttgggatcgtatctcaaaaacggcggtccgggtgtgattaaatccgcgatggccagcggtgcagccggttttggtgcggataaagtgcacgataaattagctgagtctggtcatgaggggttggctgattccttgtcgggcgctattcaaggaggtggtcttggttactccacgcttggcggtgtcactggtgctggtattggcggtgcgacgggcggtctcgcaggactagcacaaaactactttggtggtggcgatgactacagcaacgctggggcatctgcatcggggtttagtgccaaccaggttaatagtgagatcagcaccgagattccgcagtttgcgaatcttggtcaaccacagcgatccgagcttgaacaattagcgctacctcaagaatcacggtctgtagataagagctacgaccaaggctacgaagcgtaagcgctttataacaaccccgt

SEQ ID NO: 890 - protein, 282 aa, Corynebacterium glutamicum
MAFPLLAVAGTVAPVAAGWAKDKFLSNSQNNQQAQNQQMSFGQVNNSAQNSGSENSGFMGQYGNLGAGLAGAATGAGLAYSDFEDGQSLSSKARNMVGKGLAGAGAGVFTKLANDAIQAEGGSMKASAYSAIASGLGSYLKNGGPGVIKSAMASGAAGFGADKVHDKLAESGHEGLADSLSGAIQGGGLGYSTLGGVTGAGIGGATGGLAGLAQNYFGGGDDYSNAGASASGFSANQVNSEISTEIPQFANLGQPQRSELEQLALPQESRSVDKSYDQGYEA

SEQ ID NO: 891 - DNA, 1062 bp, Corynebacterium glutamicum
  CDS (101)..(1039): RXN01911
agatgccgcagatcaccgagtgagcgttactgagatcactgagtctcgatgggtaatccatataattgtgagcgggattcttagtgcgctcgcggttctggtgtttattattggcgccggcttgccactgttgtacgtgccgatttttgtgactgtcatcgtcatggtggtgtatgcgctattgcgctatgagcagcgcatgtcaggcacagtctacgaggaagcagatcctgtcgaaatggattcagtgatctgggagggcatcaagtgcgatattgcctcggatattgcagcccgagcagaagcgaaaaaagcgaaaaagccagttgcgtcagatgctgttgctgttggtaactatatcgcgtccttgcgtcagcatatgttggtagaaacccagcgacgttatcaccacaagcttggtcgtgagctgcataatgatccagcgcaactagaggattatggctctggtctgcgtgactgtgagtgtcgggcatgtgtggtggctcagaaattgggtgtcacggtgcacgctcatggtgtggtgcaggcgagcgcacgtaaaaaagatcgcgtcattattgggcgagccgatggtattgatgtggccggctggtggaaccaccgccaagaagctcgacgtaaaacgagcgcggctaagcagttggagcgcgatgcacaacgcaagcgaacccaagctgagcgcgataaagagattgagcgtaagcgtaaggctcaagaatttgtagcggagcagtcagggaaagctgctgcagcacaacggcgggccgagaaaaaggctgcgaagcaagcgcgtgtagatgaactggtggcgcagaaacaggctgctcaggagcagaaaactcactgtaagcgggacaagcagcgtgcgaagaaagcacaagggcgcaaagttggtgccgttgataattccgctgtggacgatgtgttggcgtatgcggagaaaacccgcagtatagctggctgtagagatgacgacagcgttgtgcacgttgatatggcagcgggtgtccgcgatgtctaaatcgcaggatgatcgaaaaa

SEQ ID NO: 892 - protein, 313 aa, Corynebacterium glutamicum
VFIIGAGLPLLYVPIFVTVIVMVVYALLRYEQRMSGTVYEEADPVEMDSVIWEGIKCDIASDIAARAEAKKAKKPVASDAVAVGNYIASLRQHMLVETQRRYHHKLGRELHNDPAQLEDYGSGLRDCECRACVVAQKLGVTVHAHGVVQASARKKDRVIIGRADGIDVAGWWNHRQEARRKTSAAKQLERDAQRKRTQAERDKEIERKRKAQEFVAEQSGKAAAAQRRAEKKAAKQARVDELVAQKQAAQEQKTHCKRDKQRAKKAQGRKVGAVDNSAVDDVLAYAEKTRSIAGCRDDDSVVHVDMAAGVRDV

SEQ ID NO: 893 - DNA, 946 bp, Corynebacterium glutamicum
  CDS (101)..(946): FRXA01911
agatgccgcagatcaccgagtgagcgttactgagatcactgagtctcgatgggtaatccatataattgtgagcgggattcttagtgcgctcgcggttctggtgtttattattggcgccggcttgccactgttgtacgtgccgatttttgtgactgtcatcgtcatggtggtgtatgcgctattgcgctatgagcagcgcatgtcaggcacagtctacgaggaagcagatcctgtcgaaatggattcagtgatctgggagggcatcaagtgcgatattgcctcggatattgcagcccgagcagaagcgaaaaaagcgaaaaagccagttgcgtcagatgctgttgctgttggtaactatatcgcgtccttgcgtcagcatatgttggtagaaacccagcgacgttatcaccacaagcttggtcgtgagctgcataatgatccagcgcaactagaggattatggctctggtctgcgtgactgtgagtgtcgggcatgtgtggtggctcagaaattgggtgtcacggtgcacgctcatggtgtggtgcaggcgagcgcacgtaaaaaagatcgcgtcattattgggcgagccgatggtattgatgtggccggctggtggaaccaccgccaagaagctcgacgtaaaacgagcgcggctaagcagttggagcgcgatgcacaacgcaagcgaacccaagctgagcgcgataaagagattgagcgtaagcgtaaggctcaagaatttgtagcggagcagtcagggaaagctgctgcagcacaacggcgggccgagaaaaaggctgcgaagcaagcgcgtgtagatgaactggtggcgcagaaacaggctgctcaggagcagaaaactcactgtaagcgggacaagcagcgtgcgaagaaagcacaagggcgcaaagttggtgccgttgataattccgctgtggacgatgtg

SEQ ID NO: 894 - protein, 282 aa, Corynebacterium glutamicum
VFIIGAGLPLLYVPIFVTVIVMVVYALLRYEQRMSGTVYEEADPVEMDSVIWEGIKCDIASDIAARAEAKKAKKPVASDAVAVGNYIASLRQHMLVETQRRYHHKLGRELHNDPAQLEDYGSGLRDCECRACVVAQKLGVTVHAHGVVQASARKKDRVIIGRADGIDVAGWWNHRQEARRKTSAAKQLERDAQRKRTQAERDKEIERKRKAQEFVAEQSGKAAAAQRRAEKKAAKQARVDELVAQKQAAQEQKTHCKRDKQRAKKAQGRKVGAVDNSAVDDV

SEQ ID NO: 895 - DNA, 1074 bp, Corynebacterium glutamicum
  CDS (101)..(1051): RXN01930
cgaaagaagccataatttagagaggacaattctctactattggtcaaggctcccacccggtgtcattcgacattattaccgctcactcacaatcgatgaagtgatttcaacaaatgagattgaaaatattcactcaactcgtcgggatattgaaatagcgcttgatgaatcttccactagtgagccaaagagattttcggaaatttcacacctttacctcgcacttgccgaaggtaaaatatcctttccggaaagcccaagtgaacttcgagaactctatgaccatttaatgcacggcgagctaggtaaagaaaatgaattagatggtgagattttccgccaaggacccgtggaaatccgcgatagtcggcaaaaagtgattcattcaggtttttctccagaatcacagatcatcgaaggaatcaacgcaattattaagctggcgcactcagaagaggaatccaaccttgttggcatcatgatgtcacacttcatgtttgaatcaattcacccgttttatgatggaaacggaagaactgggcgctaccttctcgggatacaattaagcaaaattctctcccctgctacagcactgacaatgtcttcggcaattaatcaatttcgaaacaagtactacaaagcgtttcatgccgtagaacaccgattaaatcgcggagacggaacaccgtttgttatttccatgcttgagctgttaattgcagcgcaagaaggtctcattgagaatataaaacaaagaatcgactttttggcaagccttgaggacgccattaaaacgcttcggggtaccaattcctttaagaaccatcagatcaatctgttgtacattctcggccagattcagcttttcggtaaggacgaaacactttcacttgaatcggcagcaaagtttcttaaagtttctaaggcaactgcaacgaggtattttagaactctccgagaaatggaattagttcacgaggtcagcaaacgccctttgcggtttgcgctcacggataaaggtcgtgagatagtaggtcttgaggtaaaaatttgactccataacgagaacttaat

SEQ ID NO: 896 - protein, 317 aa, Corynebacterium glutamicum
VISTNEIENIHSTRRDIEIALDESSTSEPKRFSEISHLYLALAEGKISFPESPSELRELYDHLMHGELGKENELDGEIFRQGPVEIRDSRQKVIHSGFSPESQIIEGINAIIKLAHSEEESNLVGIMMSHFMFESIHPFYDGNGRTGRYLLGIQLSKILSPATALTMSSAINQFRNKYYKAFHAVEHRLNRGDGTPFVISMLELLIAAQEGLIENIKQRIDFLASLEDAIKTLRGTNSFKNHQINLLYILGQIQLFGKDETLSLESAAKFLKVSKATATRYFRTLREMELVHEVSKRPLRFALTDKGREIVGLEVKI

SEQ ID NO: 897 - DNA, 1074 bp, Corynebacterium glutamicum; identical to SEQ ID NO: 895
  CDS (101)..(1051): FRXA01930

SEQ ID NO: 898 - protein, 317 aa, Corynebacterium glutamicum; identical to SEQ ID NO: 896

SEQ ID NO: 899 - DNA, 1095 bp, Corynebacterium glutamicum
  CDS (101)..(1072): RXN01944
gctgattcttctgtaccactcatcacagataataccgcaaccagtatcaaccctgcggagccgtttaccttcgccttcaaatatcaccgatgatgtccaggtgcgcacggcaacactgcatgttacttccagtgctggcgaagccgcgacaaccatcaacctcaccgaggatgacggctctttcaattgggctctgcctgcagcggatctcaccggaaaatcctggttcgaatacaccgtaaccgccaccgacggattcaacagcgttaccaccgagccggtacgcgtcaccgtcgacggcgccaacaccgacccgctgcgcctcaacctggaagaaaaccaatgggtcagtggcaccaccgatgttatcggtgcttcagatgtcttcggcgacaagcttgaattgcttatcgacgacgcgcctgcagtcaccaactccagcctgtctgcggccccgacgtttgcgatggaagtaacccaaactgatgtgttcttccgcaacggcatccttgccggtggggaagaactccgcattttcgatcaaggaacttacgccaacaccgaaaccatctccacaccagtcccgctgtatcacatcaatgaggacggtaccctcacagtcagtgtgtatgcgggaactaaagcagcaccagaaattgacctcaacgagaacaatgacgatttccagatcagaaaccttcgactaattctgcctgatggccggaccctcacccctgccggaatttccgattctaatgcgtggctcaacatgggagacagcgctggaaaactcgatttcttcgatgccaccttcgccctccctgaggatgctttcaccggtgtggcacacgcatgggataccacccaaagcacagatggagaacaccacatcaccatttcccgcgaagacggcggggaaatcagccgcaccatccgggttgataatactgccccagaactcaccgtttctggagttgaagaaggacaagaactgcgcggcaccgtagaaattgatgcccaggcaaccgatgcgggtgcgggcgtgaagagcgtcgagacgcttctcgacggctaacgcgtgcaacttccactaac

SEQ ID NO: 900 - protein, 324 aa, Corynebacterium glutamicum
VRTATLHVTSSAGEAATTINLTEDDGSFNWALPAADLTGKSWFEYTVTATDGFNSVTTEPVRVTVDGANTDPLRLNLEENQWVSGTTDVIGASDVFGDKLELLIDDAPAVTNSSLSAAPTFAMEVTQTDVFFRNGILAGGEELRIFDQGTYANTETISTPVPLYHINEDGTLTVSVYAGTKAAPEIDLNENNDDFQIRNLRLILPDGRTLTPAGISDSNAWLNMGDSAGKLDFFDATFALPEDAFTGVAHAWDTTQSTDGEHHITISREDGGEISRTIRVDNTAPELTVSGVEEGQELRGTVEIDAQATDAGAGVKSVETLLDG

SEQ ID NO: 901 - DNA, 407 bp, Corynebacterium glutamicum
  CDS (1)..(384): FRXA01944
atcagaaaccttcgactaattctgcctgatggccggaccctcacccctgccggaatttccgattctaatgcgtggctcaacatgggagacagcgctggaaaactcgatttcttcgatgccaccttcgccctccctgaggatgctttcaccggtgtggcacacgcatgggataccacccaaagcacagatggagaacaccacatcaccatttcccgcgaagacggcggggaaatcagccgcaccatccgggttgataatactgccccagaactcaccgtttctggagttgaagaaggacaagaactgcgcggcaccgtagaaattgatgcccaggcaaccgatgcgggtgcgggcgtgaagagcgtcgagacgcttctcgacggctaacgcgtgcaacttccactaac

SEQ ID NO: 902 - protein, 128 aa, Corynebacterium glutamicum
IRNLRLILPDGRTLTPAGISDSNAWLNMGDSAGKLDFFDATFALPEDAFTGVAHAWDTTQSTDGEHHITISREDGGEISRTIRVDNTAPELTVSGVEEGQELRGTVEIDAQATDAGAGVKSVETLLDG

SEQ ID NO: 903 - DNA, 673 bp, Corynebacterium glutamicum
  CDS (101)..(673): FRXA01636
gctgattcttctgtaccactcatcacagataataccgcaaccagtatcaaccctgcggagccgtttaccttcgccttcaaatatcaccgatgatgtccaggtgcgcacggcaacactgcatgttacttccagtgctggcgaagccgcgacaaccatcaacctcaccgaggatgacggctctttcaattgggctctgcctgcagcggatctcaccggaaaatcctggttcgaatacaccgtaaccgccaccgacggattcaacagcgttaccaccgagccggtacgcgtcaccgtcgacggcgccaacaccgacccgctgcgcctcaacctggaagaaaaccaatgggtcagtggcaccaccgatgttatcggtgcttcagatgtcttcggcgacaagcttgaattgcttatcgacgacgcgcctgcagtcaccaactccagcctgtctgcggccccgacgtttgcgatggaagtaacccaaactgatgtgttcttccgcaacggcatccttgccggtggggaagaactccgcattttcgatcaaggaacttacgccaacaccgaaaccatctccacaccagtcccgctgtatcacatcaatgaggacggtaccctcacagtcagtgtgtatgcgggaactaaagcagcaccagaaattgacctcaacgagaac

SEQ ID NO: 904 - protein, 191 aa, Corynebacterium glutamicum
VRTATLHVTSSAGEAATTINLTEDDGSFNWALPAADLTGKSWFEYTVTATDGFNSVTTEPVRVTVDGANTDPLRLNLEENQWVSGTTDVIGASDVFGDKLELLIDDAPAVTNSSLSAAPTFAMEVTQTDVFFRNGILAGGEELRIFDQGTYANTETISTPVPLYHINEDGTLTVSVYAGTKAAPEIDLNEN

SEQ ID NO: 905 - DNA, 2115 bp, Corynebacterium glutamicum
  CDS (101)..(2092): RXN01945
agaaggacaagaactgcgcggcaccgtagaaattgatgcccaggcaaccgatgcgggtgcgggcgtgaagagcgtcgagacgcttctcgacggctaacgcgtgcaacttccactaaccaccggttccatcgctttggataaaggtgaacacaccttggttatccgtgcagaagatgaagtaggaaaccgcaccgagaaaaccatcacgtttagcactccggatgaaaaccccatcagtggtgactacgctccaagcaatggggccaccgtgggcgtcggtgacgttaagttatctgcacgagcaagtgatccaagtggcgatactgtcaagatgacgttcctggaagccgattcaccaaaattagatagtggtcgcgtccgaatgtcatcaggaacggtagaagatgccggaagtgtctcgcgcgccgaggcgaaaatgttggagaggggagacgtcgagaagctatccagcctggatgggctgggcatggaagttacctccgacgccgcactgccgtaccagctttttgaagtcgatgcggcggatgcactcgcggccgacactgaagtgcgcctgaattgggcgggatccgccgatggtcgcgcgcaggtgatcatgtatgttttcgatggcgaggcgtgggttgaggtggatcgtcacttgaccggcgatgagctggaagagtttacgctgcagggcgtcgtcaatgcggaaaaatttgcaatcggcggcactgtcaccgtattgattcagcactccgaaggcttcgccggtgcggatcattcaactagaaattccgacgtgaccgcagcgcacccggatgatgtggctcgctctgagtacgatttcaccctcgcgtgggaatctgacacccagtactacaacgaggaattccacgagcaccaaaccaacatccatgactacgtgctcgccgaacgggagaacaagaatattcagttcatgttccacactggcgatgttgtcgacgactgggatcagcccgcgcagtgggccacagccaaccccgaataccagcgcctcgacgacgccggcctgccatattctgtccttgccggaaaccacgatgttggccacaccagcaatgactacaccgaattcagccgacacttcggcgaacagcgctacgtagacaacccgtggtacggcgaatcctaccaagacaaccgagggcactacgatctattttctgccggcggaattgacttcattaacgtagcgatgggctggggtccagacgacgaagaaatcgcgtggatgaacgaggtcctggccaagcatcccgagcgtgtggcgatcctcaacctccacgaattcatgctcaccaccggcggacttggcccgatcccgcagcgcattctcgacgaggtcgcagccaccaacccaaatgtcagcatgatcatgtccggccactaccacgacgcattccaacgcaccgactcctttgacgacgatggtgatggagtagatgaccgcaccgtcacctctatgcttttcgattaccaaggcctaccggagggcggacaggggtacctccgacttctccactttgataaccaaggccaaaagatgatggtgcgcacctattcaccatccctgaaggattacaactctgatgaaccctcactgttggggcctgcagaagaccccaacatgtatcaagaattcgaagtgtcctacgagcagctcggcatcaaaccagagggccgcaccctgatcggcgattccttcagcgccgatttcttgacctccaatgaaattggaatagttgatgaggttccttctggaacgatcgctttcacgaactggaaggacgtaaccgaaggtcgccacagttggtatgttcgctccgaggatcctttcggcggcgtcgagatttcacccgtgcagtccttcattgccggggaagaggctggcgggaacgcgcccggcactggaagctccaatggcggttcatcccacggattatggggtgcgcttgcggaattctttgccggagcggcagccctggctggagctgcgatcgcatttgtccccggaatttgggactatgtgaccaacgcattcaagcgataattatggataggtaaacgctc

SEQ ID NO: 906 - protein, 664 aa, Corynebacterium glutamicum
VQLPLTTGSIALDKGEHTLVIRAEDEVGNRTEKTITFSTPDENPISGDYAPSNGATVGVGDVKLSARASDPSGDTVKMTFLEADSPKLDSGRVRMSSGTVEDAGSVSRAEAKMLERGDVEKLSSLDGLGMEVTSDAALPYQLFEVDAADALAADTEVRLNWAGSADGRAQVIMYVFDGEAWVEVDRHLTGDELEEFTLQGVVNAEKFAIGGTVTVLIQHSEGFAGADHSTRNSDVTAAHPDDVARSEYDFTLAWESDTQYYNEEFHEHQTNIHDYVLAERENKNIQFMFHTGDVVDDWDQPAQWATANPEYQRLDDAGLPYSVLAGNHDVGHTSNDYTEFSRHFGEQRYVDNPWYGESYQDNRGHYDLFSAGGIDFINVAMGWGPDDEEIAWMNEVLAKHPERVAILNLHEFMLTTGGLGPIPQRILDEVAATNPNVSMIMSGHYHDAFQRTDSFDDDGDGVDDRTVTSMLFDYQGLPEGGQGYLRLLHFDNQGQKMMVRTYSPSLKDYNSDEPSLLGPAEDPNMYQEFEVSYEQLGIKPEGRTLIGDSFSADFLTSNEIGIVDEVPSGTIAFTNWKDVTEGRHSWYVRSEDPFGGVEISPVQSFIAGEEAGGNAPGTGSSNGGSSHGLWGALAEFFAGAAALAGAAIAFVPGIWDYVTNAFKR

SEQ ID NO: 907 - DNA, 1342 bp, Corynebacterium glutamicum
  CDS (101)..(1342): FRXA01945
agaaggacaagaactgcgcggcaccgtagaaattgatgcccaggcaaccgatgcgggtgcgggcgtgaagagcgtcgagacgcttctcgacggctaacgcgtgcaacttccactaaccaccggttccatcgctttggataaaggtgaacacaccttggttatccgtgcagaagatgaagtaggaaaccgcaccgagaaaaccatcacgtttagcactccggatgaaaaccccatcagtggtgactacgctccaagcaatggggccaccgtgggcgtcggtgacgttaagttatctgcacgagcaagtgatccaagtggcgatactgtcaagatgacgttcctggaagccgattcaccaaaattagatagtggtcgcgtccgaatgtcatcaggaacggtagaagatgccggaagtgtctcgcgcgccgaggcgaaaatgttggagaggggagacgtcgagaagctatccagcctggatgggctgggcatggaagttacctccgacgccgcactgccgtaccagctttttgaagtcgatgcggcggatgcactcgcggccgacactgaagtgcgcctgaattgggcgggatccgccgatggtcgcgcgcaggtgatcatgtatgttttcgatggcgaggcgtgggttgaggtggatcgtcacttgaccggcgatgagctggaagagtttacgctgcagggcgtcgtcaatgcggaaaaatttgcaatcggcggcactgtcaccgtattgattcagcactccgaaggcttcgccggtgcggatcattcaactagaaattccgacgtgaccgcagcgcacccggatgatgtggctcgctctgagtacgatttcaccctcgcgtgggaatctgacacccagtactacaacgaggaattccacgagcaccaaaccaacatccatgactacgtgctcgccgaacgggagaacaagaatattcagttcatgttccacactggcgatgttgtcgacgactgggatcagcccgcgcagtgggccacagccaaccccgaataccagcgcctcgacgacgccggcctgccatattctgtccttgccggaaaccacgatgttggccacaccagcaatgactacaccgaattcagccgacacttcggcgaacagcgctacgtagacaacccgtggtacggcgaatcctaccaagacaaccgagggcactacgatctattttctgccggcggaattgacttcattaacgtagcgatgggctggggtccagacgacgaagaaatcgcgtggatgaacgaggtcctggccaagcatcccgagcgtgtggcgatcctcaacctccacgaattcatgctc

SEQ ID NO: 908 - protein, 414 aa, Corynebacterium glutamicum
VQLPLTTGSIALDKGEHTLVIRAEDEVGNRTEKTITFSTPDENPISGDYAPSNGATVGVGDVKLSARASDPSGDTVKMTFLEADSPKLDSGRVRMSSGTVEDAGSVSRAEAKMLERGDVEKLSSLDGLGMEVTSDAALPYQLFEVDAADALAADTEVRLNWAGSADGRAQVIMYVFDGEAWVEVDRHLTGDELEEFTLQGVVNAEKFAIGGTVTVLIQHSEGFAGADHSTRNSDVTAAHPDDVARSEYDFTLAWESDTQYYNEEFHEHQTNIHDYVLAERENKNIQFMFHTGDVVDDWDQPAQWATANPEYQRLDDAGLPYSVLAGNHDVGHTSNDYTEFSRHFGEQRYVDNPWYGESYQDNRGHYDLFSAGGIDFINVAMGWGPDDEEIAWMNEVLAKHPERVAILNLHEFML

SEQ ID NO: 909 - DNA, 518 bp, Corynebacterium glutamicum
  CDS (1)..(495): FRXA01627
cgcacctattcaccatccctgaaggattacaactctgatgaaccctcactgttggggcctgcagaagaccccaacatgtatcaagaattcgaagtgtcctacgagcagctcggcatcaaaccagagggccgcaccctgatcggcgattccttcagcgccgatttcttgacctccaatgaaattggaatagttgatgaggttccttctggaacgatcgctttcacgaactggaaggacgtaaccgaaggtcgccacagttggtatgttcgctccgaggatcctttcggcggcgtcgagatttcacccgtgcagtccttcattgccggggaagaggctggcgggaacgcgcccggcactggaagctccaatggcggttcatcccacggattatggggtgcgcttgcggaattctttgccggagcggcagccctggctggagctgcgatcgcatttgtccccggaatttgggactatgtgaccaacgcattcaagcgataattatggataggtaaacgctc

SEQ ID NO: 910 - protein, 165 aa, Corynebacterium glutamicum
RTYSPSLKDYNSDEPSLLGPAEDPNMYQEFEVSYEQLGIKPEGRTLIGDSFSADFLTSNEIGIVDEVPSGTIAFTNWKDVTEGRHSWYVRSEDPFGGVEISPVQSFIAGEEAGGNAPGTGSSNGGSSHGLWGALAEFFAGAAALAGAAIAFVPGIWDYVTNAFKR

SEQ ID NO: 911 - DNA, 441 bp, Corynebacterium glutamicum
  CDS (101)..(418): RXN01960
tccagattgatcgtgccaacaaagactaagccactctagctaaaccaacttaccccaccccaacaccccatgaggcatctgcttcatggggtgttttgctatgccgcaacacttttctcaagaaaactacagaaaggcccccgtcattatgtctgcaccgctcaccattcatgatctgctgtccaccaattcgaagcttaacctcaagtggctgacctgcactgtcttgaacagcccaaatctcaccgaaccctgcatcacggtttctgtgaaccacaccgaaggcatgtccctggtctctttcgaaggtggtcacgggctcaccgagattgccaacacccagctagtgcctgtgcttgagctaccaaagttcaatccttttgaggcacttgctatccaccttgaagccgccaacaactaagaaagcatccttcatgactg

SEQ ID NO: 912 - protein, 106 aa, Corynebacterium glutamicum
MPQHFSQENYRKAPVIMSAPLTIHDLLSTNSKLNLKWLTCTVLNSPNLTEPCITVSVNHTEGMSLVSFEGGHGLTEIANTQLVPVLELPKFNPFEALAIHLEAANN

SEQ ID NO: 913 - DNA, 441 bp, Corynebacterium glutamicum
  CDS (101)..(418): FRXA01960
tccagattgatcgtgccaacaaagactaagccactctagctaaaccaacttaccccaccccaacaccccatgaggcatctgcttcatggggtgttttgctatgccgcaacacttttctcaagaaaactacagaaaggcccccgtcattatgtctgcaccgctcaccattcatgatctgctgtccaccaattcgaagcttaacctcaagtggctgacctgcactgtcttgaacagcccaaatctccccgaaccctgcatcacggtttctgtgaaccacaccgaaggcatgtccctggtctctttcgaaggtggtcacgggctcaccgagattgccaacacccagctagtgcctgtgcttgagctaccaaagttcaatccttttgaggcacttgctatccaccttgaagccgccaacaactaagaaagcatccttcatgactg

SEQ ID NO: 914 - protein, 106 aa, Corynebacterium glutamicum
MPQHFSQENYRKAPVIMSAPLTIHDLLSTNSKLNLKWLTCTVLNSPNLPEPCITVSVNHTEGMSLVSFEGGHGLTEIANTQLVPVLELPKFNPFEALAIHLEAANN

SEQ ID NO: 915 - DNA, 1173 bp, Corynebacterium glutamicum
  CDS (101)..(1150): RXN01985
gacgtgagacatttcctccaatacctctccagtgatattctgtcgggcagcctaacctaagttattccgttgttgttcgagaaagagagagaaacttttcatgcgtacgtctcgcgttctagccggcattcttgccgcaaccctcacggtgtccctcgcggcctgctcccaggattcttcagaaacgtcctccaattcgtcttcagcagcatcccaaagctctgacgtttccaacgaggcgttccctgtcaccattgagcacgctttcggcgagaccaccattgagtccaagccagaacgcatcgcaactgttggctggtccaaccatgaagtccctctcgcattgggtgtgactcctgtcggctttgagaaggtcacgtggggcgacgatgacaacaacggcatcttgccatgggtggaagaaaccttgagcaagctcggctccgatgagcctgtgcttttcgatgccaccgattccattccttttgaggagatcgccaacactgctccggatgtcattttggcgtcctactctggcatcacccaggaagactacgatcagctgtcccagatcgcacctgtggttgcctacccagaaatcgcatggggcacctccctggatgaaatgattgagatgaactctaaggcgattggcttggagcaagaaggcaaggatctcatcgcagatctggatgcagaggttgcttccgccatcgatgccaacccagagttgaaggatgcgaagcctgtattcgcgttcttcgatgagagcgatttctcgcagattggtgtgtacaccagcattgatcctcgcatgagcttcttgcttgatgcgggtgtccaggaagcttcagtcctcaaggagcactccagcccagatagcttctacgagcaggtttctgcagaaaaccctgaaaccttcgacgatgttgatgtgatcatcacctacggcaccgaagatgatgctgcaaacgctgagctgttgtccaagatgcaggctgatccactgctgtctcgaatcccagctatcgccgagggcaaggttgtgttcttgggtgctaacccactggctgcttcagcgaatgaatccccactatctattccttggggtatcaacgattactttgcaaaactcgccgaacctctgaagtaaaactgcttgatgtcaacaac

SEQ ID NO: 916 - protein, 350 aa, Corynebacterium glutamicum
MRTSRVLAGILAATLTVSLAACSQDSSETSSNSSSAASQSSDVSNEAFPVTIEHAFGETTIESKPERIATVGWSNHEVPLALGVTPVGFEKVTWGDDDNNGILPWVEETLSKLGSDEPVLFDATDSIPFEEIANTAPDVILASYSGITQEDYDQLSQIAPVVAYPEIAWGTSLDEMIEMNSKAIGLEQEGKDLIADLDAEVASAIDANPELKDAKPVFAFFDESDFSQIGVYTSIDPRMSFLLDAGVQEASVLKEHSSPDSFYEQVSAENPETFDDVDVIITYGTEDDAANAELLSKMQADPLLSRIPAIAEGKVVFLGANPLAASANESPLSIPWGINDYFAKLAEPLK

SEQ ID NO: 917 - DNA, 336 bp, Corynebacterium glutamicum
  CDS (101)..(313): RXN01987
gggttaggagaggggaaatccccgatgtgctctaggttcttattggcgatgattgaagaagaaagaaaaactcaatcagccataaaggagcttgatcccgatgactttcccagcacaatctcgacgactcgcccgaagcaccaccgacaaatggatcggcggcgtcgctggtggcctcgcagagacctacggttggaatccggcctatgtgcgtctcgcgttcgtggcgtcggttctgtttccactgccaggttcacagatcctgttctacgccctagcgtggctgatcatcccatcccgagaaaatcgcttctaacgtgcgttgcataacgcaga

SEQ ID NO: 918 - protein, 71 aa, Corynebacterium glutamicum
MTFPAQSRRLARSTTDKWIGGVAGGLAETYGWNPAYVRLAFVASVLFPLPGSQILFYALAWLIIPSRENRF

SEQ ID NO: 919 - DNA, 336 bp, Corynebacterium glutamicum; identical to SEQ ID NO: 917
  CDS (101)..(313): FRXA01987

SEQ ID NO: 920 - protein, 71 aa, Corynebacterium glutamicum; identical to SEQ ID NO: 918

SEQ ID NO: 921 - DNA, 549 bp, Corynebacterium glutamicum
  CDS (101)..(526): RXN01988
ttaagaattggattcgagtcggtaccgcttgaaagtactttgcgtaagttcccaccgactgcccctagttgttgcgaatatttatagattgttgagaaagatgaacatgaagacgcacccggcttccgccaagcagaccaccgagcttcgactcctgacagccaccgtgtacttcaaagcactcaatgaagtccacaacgtcatgcagatgatcgacccactaactccagtcgttcccatcaccacgggcacctcagttgccgagctttatgctgacgcccgcgagcacctcgacaatggtgcaacccaggtgatgatccccgtcatttcaccttccaacctgaccttgtcagtagttgccctgggcaatgaagaggttgacgcactgggccattccgaaggacaagcagttcactcccttctggaaattcataccccgaagcgcagctggcctctttccgagctttatattgatgacaatgagggtttggctcaggtgtcgcgctgcttcgcccgccttgttggctagtcccaccccaccaattgcat

SEQ ID NO: 922 - protein, 142 aa, Corynebacterium glutamicum
MNMKTHPASAKQTTELRLLTATVYFKALNEVHNVMQMIDPLTPVVPITTGTSVAELYADAREHLDNGATQVMIPVISPSNLTLSVVALGNEEVDALGHSEGQAVHSLLEIHTPKRSWPLSELYIDDNEGLAQVSRCFARLVG

SEQ ID NO: 923 - DNA, 341 bp, Corynebacterium glutamicum
  CDS (1)..(318): FRXA01988
atgatcgacccactaactccagtcgttcccatcaccacgggcacctcagttgccgagctttatgctgacgcccgcgagcacctcgacaatggtgcaacccaggtgatgatccccgtcatttcaccttccaacctgaccttgtcagtagttgccctgggcaatcaagaggttgacgcactgggccattccgaaggacaagcagttcactcccttctggaaattcataccccgaagcgcagctggcctctttccgagctttatattgatgacaatgagggtttggctcaggtgtcgcgctgcttcgcccgccttgttggctagtcccaccccaccaattgcat

SEQ ID NO: 924 - protein, 106 aa, Corynebacterium glutamicum
MIDPLTPVVPITTGTSVAELYADAREHLDNGATQVMIPVISPSNLTLSVVALGNQEVDALGHSEGQAVHSLLEIHTPKRSWPLSELYIDDNEGLAQVSRCFARLVG

SEQ ID NO: 925 - DNA, 996 bp, Corynebacterium glutamicum
  CDS (101)..(973): RXN01991
tccggaggtggatttgaggatttcgacgttttctcggaagttcctcgggtagaggaaacatcgacgaggatcagctattcttacaaaaattcatttgaatatgacgaatttgttgccgcatttcccgagtaccgacgtagctgcgtgggaaccaaccgttgtgtattcagcggataagaccacagcaacagcgacgtttaagaatattccttcggatatttcctttagttggactggtattgaagcactagagccatttagccctggtaaaaccttcgaacataaggtgcaaggttctgttggtgaaccagcgggggcgttcactagggataactatttcactgagggtgagctctacaaacatcgccacgcagacgatctgctttccggtgatggcttgtttggccccaacatcaccgatggcgatggcaacctcccctctgttgatgacggcaaggacggtgacgatgggtctgatggctcagacggccgagacggtgttgtcgccattgatgttgttgacaatgctgacggcacggtgactgtcaccttgtccgatggcactacgtttactcttgatgctggtcaagacggcaaagatggtcttgacgggcttgatggtactggcctaacgctggaatctgctacccctgatgaggacggcaacatcacctatgttctttctgacggtactgagttcactgtgcgcaacggtgttgatgggtcagacggtaaggacggcaaagatggagtcaatggcacagatggcgtagacgggtcagacggtaaaggtctggtagaggtgtcccgagttaccaacgacaacggctcagtgaccattacctacgaggacggttcacagatcaccacgaagccaacgccgacaaactggctgtccaagctgcttgatttgcttctcccgctgtttaatctgttcggtcttggtggcggctccgtcattagttccagtaagtagttttttcactccctgttttg

SEQ ID NO: 926 - protein, 291 aa, Corynebacterium glutamicum
MTNLLPHFPSTDVAAWEPTVVYSADKTTATATFKNIPSDISFSWTGIEALEPFSPGKTFEHKVQGSVGEPAGAFTRDNYFTEGELYKHRHADDLLSGDGLFGPNITDGDGNLPSVDDGKDGDDGSDGSDGRDGVVAIDVVDNADGTVTVTLSDGTTFTLDAGQDGKDGLDGLDGTGLTLESATPDEDGNITYVLSDGTEFTVRNGVDGSDGKDGKDGVNGTDGVDGSDGKGLVEVSRVTNDNGSVTITYEDGSQITTKPTPTNWLSKLLDLLLPLFNLFGLGGGSVISSSK

SEQ ID NO: 927 - DNA, 895 bp, Corynebacterium glutamicum
  CDS (101)..(895): FRXA01991
tccggaggtggatttgaggatttcgacgttttctcggaagttcctcgggtagaggaaacatcgacgaggatcagctattcttacaaaaattcatttgaatatgacgaatttgttgccgcatttcccgagtaccgacgtagctgcgtgggaaccaaccgttgtgtattcagcggataagaccacagcaacagcgacgtttaagaatattccttcggatatttcctttagttggactggtattgaagcactagagccatttagccctggtaaaaccttcgaacataaggtgcaaggttctgttggtgaaccagcgggggcgttcactagggataactatttcactgagggtgagctctacaaacatcgccacgcagacgatctgctttccggtgatggcttgtttggccccaacatcaccgatggcgatggcaacctcccctctgttgatgacggcaaggacggtgacgatgggtctgatggctcagacggccgagacggtgttgtcgccattgatgttgttgacaatgctgacggcacggtgactgtcaccttgtccgatggcactacgtttactcttgatgctggtcaagacggcaaagatggtcttgacgggcttgatggtactggcctaacgctggaatctgctacccctgatgaggacggcaacatcacctatgttctttctgacggtactgagttcactgtgcgcaacggtgttgatgggtcagacggtaaggacggcaaagatggagtcaatggcacagatggcgtagacgggtcagacggtaaaggtctggtagaggtgtcccgagttaccaacgacaacggctcagtgaccattacctacgaggacggttcacagatcaccacgaagccaacgccgacaaactggctg

SEQ ID NO: 928 - protein, 265 aa, Corynebacterium glutamicum
MTNLLPHFPSTDVAAWEPTVVYSADKTTATATFKNIPSDISFSWTGIEALEPFSPGKTFEHKVQGSVGEPAGAFTRDNYFTEGELYKHRHADDLLSGDGLFGPNITDGDGNLPSVDDGKDGDDGSDGSDGRDGVVAIDVVDNADGTVTVTLSDGTTFTLDAGQDGKDGLDGLDGTGLTLESATPDEDGNITYVLSDGTEFTVRNGVDGSDGKDGKDGVNGTDGVDGSDGKGLVEVSRVTNDNGSVTITYEDGSQITTKPTPTNWL

SEQ ID NO: 929 - DNA, 660 bp, Corynebacterium glutamicum
  CDS (101)..(637): RXN01996
ctagtatagaacggaacacggcagcgacacaaactgcacagatgcaagagtgtcggtaccgttaaaaacgaaacacactttcaccgaaaaggacttcccaatgagcaagttgactggcacctggaccctcgaccctgcacacaccgaaatcaagttcgtggctcgccacgcaatggttaccaaggttcgcggtgaattcaccgagtacaccgactccattgtcgtagatgctgaaaacccagagaactcctctgcaaaggttgttatcaagaccgcttccgttaccaccggcaacgcagaccgcgatgcacacgttaagggcgacgacttcttcgcagtagacaagttccctgaaatgactttcgaagctacttcctttgttatcaagaacgaaaacgaaggcaccgttaccggcgacctcacaattcgtgacaccaccaagtccgtcaccctggacgttgaggttggtggcgttgctgaggatccattcggcaacacccgccttggcttcgaagcctccaccgaaatcaaccgcaaggacttcggcgtagatttccaggctccactctccaccggtggcgttctggtttctgagaagatcaagatcgagatcgacggctccgcaatcaaggctgcttaagcgcccacaaacaaaaagcc

SEQ ID NO: 930 - protein, 179 aa, Corynebacterium glutamicum
MSKLTGTWTLDPAHTEIKFVARHAMVTKVRGEFTEYTDSIVVDAENPENSSAKVVIKTASVTTGNADRDAHVKGDDFFAVDKFPEMTFEATSFVIKNENEGTVTGDLTIRDTTKSVTLDVEVGGVAEDPFGNTRLGFEASTEINRKDFGVDFQAPLSTGGVLVSEKIKIEIDGSAIKAA

SEQ ID NO: 931 - DNA, 647 bp, Corynebacterium glutamicum
  CDS (88)..(624): FRXA01996
gaacacggcagcgacacaaactgcacagatgcaagagtgtcggtaccgttaaaaacgaaacacactttcaccgaaaaggacttcccaatgagcaagttgactggcacctggaccctcgaccctgcacacaccgaaatcaagttcgtggctcgccacgcaatggttaccaaggttcgcggtgaattcaccgagtacaccgactccattgtcgtagatgctgaaaacccagagaactcctctgcaaaggttgttatcaagaccgcttccgttaccaccggcaacgcagaccgcgatgcacacgttaagggcgacgacttcttcgcagtagacaagttccctgaaatgactttcgaagctacttcctttgttatcaagaacgaaaacgaaggcaccgttaccggcgacctcacaattcgtgacaccaccaagtccgtcaccctggacgttgaggttggtggcgttgctgaggatccattcggcaacacccgccttggcttcgaagcctccaccgaaatcaaccgcaaggacttcggcgtagatttccaggctccactctccaccggtggcgttctggtttctgagaagatcaagatcgagatcgacggctccgcaatcaaggctgcttaagcgcccacaaacaaaaagcc

SEQ ID NO: 932 - protein, 179 aa, Corynebacterium glutamicum; identical to SEQ ID NO: 930

SEQ ID NO: 933 - DNA, 756 bp, Corynebacterium glutamicum
  CDS (101)..(733): RXN02007
tggaagccccagccgcggtccaagagacagttgcgccgacgtccaccccttaggacgctgattacagacgtgtcccatttctttactactattggaaattatgagttcagacgcagaaaaggcatccgtggagctttccgaaaaatttcacccagaacgcacccatattttgggcgccgttgtttttggcctgatctcattattagtcatcggcgcagcccctcagtacctgttttggctgctcgcgctccctgtcatcttcggttactgggttctaaaatcatccacgatcgttgatgaacagggcatcaccgcaaactacgccttcaagggcaaaaaggttgtggcctgggaagacctcgcaggaatcggattcaagggtgcccgcactttcgctcgcaccacctccgatgcagaagtcaccctcccgggcgtcaccttcaactcccttccccgccttgaagctgcttcccacggccgcatccccgatgcgatcaccgcaagcaaggaagcagccgacggcaaggttgtagtcgttcaagaagacggctactccgtgatgatgtccaaggaagagtacttggagcgccaaaaggcactgggcaagccagttcagttgaacttcgatgacgacaccgatgggaatacaacacaaacagaaagcgttgaatcccaagagaccggacaagccgcgtctgaaacctcacatcgtgataaccctgcgtcacagcactagagtgtaataagccgtccgaa

SEQ ID NO: 934 - protein, 211 aa, Corynebacterium glutamicum
MSSDAEKASVELSEKFHPERTHILGAVVFGLISLLVIGAAPQYLFWLLALPVIFGYWVLKSSTIVDEQGITANYAFKGKKVVAWEDLAGIGFKGARTFARTTSDAEVTLPGVTFNSLPRLEAASHGRIPDAITASKEAADGKVVVVQEDGYSVMMSKEEYLERQKALGKPVQLNFDDDTDGNTTQTESVESQETGQAASETSHRDNPASQH

SEQ ID NO: 935 - DNA, 452 bp, Corynebacterium glutamicum
  CDS (1)..(429): FRXA02007
ggcatcaccgcaaactacgccttcaagggcaaaaaggttgtggcttggaaagacctcgcaggaatcggattcaagggtgcccgcactttcgctcgccccacctccgatgcagaagtcaccctcccgggcgtcaccttcaactcccttccccgccttgaagctgcttcccacggccgcatccccgatgcgatcaccgcaagcaaggaagcagccgacggcaaggttgtagtcgttcaagaagacggctactccgtgatgatgtccaaggaagagtacttggagcgccaaaaggcactgggcaagccagttcagttgaacttcgatgacgacaccgatgggaatacaacacaaacagaaagcgttgaatcccaagagaccggacaagccgcgtctgaaacctcacatcgtgataaccctgcgtcacagcactagagtgtaataagccgtccgaa

SEQ ID NO: 936 - protein, 143 aa, Corynebacterium glutamicum
GITANYAFKGKKVVAWKDLAGIGFKGARTFARPTSDAEVTLPGVTFNSLPRLEAASHGRIPDAITASKEAADGKVVVVQEDGYSVMMSKEEYLERQKALGKPVQLNFDDDTDGNTTQTESVESQETGQAASETSHRDNPASQH

SEQ ID NO: 937 - DNA, 630 bp, Corynebacterium glutamicum
  CDS (101)..(607): RXN02014
agaggacaacaacatgagagcagacgcactaaaacgccgcgaacacatcataaccacaacctgcaatctctaccgcacacaccatcacgattcgctcaccatggaaaacattgcagaacaggcaggagtgggtgttgcaactttataccgaaacttccccgatcgcttcacactggacatggcatgcgcccaataccttttcaacgtggtgatctccctccaactccaagccatcagcaccttccccaccgacccagaaggcgtgtggacctccttcaaccaactacttttcgaccgcggcctaggctccctcgtcccagcacttgccccagaatccttagacgacctccccgacgaggtctccgccctgcgtcgcaccacagagaaaaacaccacaacactcatcaacctagccaagcagcacggactcgtacaccacgacatcgcgccgggcacctacatcgtcggtttgatcaccatttcccgcccacctatcaccgcgctggcgacaatttcagaaaactcccacaaagcactgcttggcctttatttgtccggtcttaaacacggcatgatggctaacatcggagaacatgacggaaagtcctgatctagcagtttcctttttag

SEQ ID NO: 938 - protein, 169 aa, Corynebacterium glutamicum
MENIAEQAGVGVATLYRNFPDRFTLDMACAQYLFNVVISLQLQAISTFPTDPEGVWTSFNQLLFDRGLGSLVPALAPESLDDLPDEVSALRRTTEKNTTTLINLAKQHGLVHHDIAPGTYIVGLITISRPPITALATISENSHKALLGLYLSGLKHGMMANIGEHDGKS

SEQ ID NO: 939 - DNA, 419 bp, Corynebacterium glutamicum
  CDS (1)..(396): FRXA02014
atctccctccaactccaagccatcagcaccttccccaccgacccagaaggcgtgtggacctccttcaaccaactacttttcgaccgcggcctaggctccctcgtcccagcacttgccccagaatccttagacgacctccccgacgaggtctccgccctgcgtcgcaccacagagaaaaacaccacaacactcatcaacctagccaagcagcacggactcgtacaccacgacatcgcgccgggcacctacatcgtcggtttgatcaccatttcccgcccacctatcaccgcgctggcgacaatttcagaaaactcccacaaagcactgcttggcctttatttgtccggtcttaaacacggcatgatggctaacatcggagaacatgacggaaagtcctgatctagcagtttcctttttag

SEQ ID NO: 940 - protein, 132 aa, Corynebacterium glutamicum
ISLQLQAISTFPTDPEGVWTSFNQLLFDRGLGSLVPALAPESLDDLPDEVSALRRTTEKNTTTLINLAKQHGLVHHDIAPGTYIVGLITISRPPITALATISENSHKALLGLYLSGLKHGMMANIGEHDGKS

SEQ ID NO: 941 - DNA, 524 bp, Corynebacterium glutamicum
  CDS (1)..(501): RXN02019
gaaattcctgctggcaccaaggttgaggcctctgaccttggacttcaggcaatccctacttccctactgcccagcacctcctacgattcgattgacgatgtagttgggctcgttgcggcctccacattaagttccggggaaatagccacaaagcctcgattcgtgggcaccgaattgataaactccattgcgacaaacgtcactgatagctctttggtggaagaaattaacatggttccactcagtttggctgaaccttccgtcatccccctactgcagcatggggacaccatttcggttgtttcccaagacccagacaccggtctcccagagaacattgctgcaggtggaacagtaattctggcgggtggtacagacccctcaaccatcttgattgcgcttccacaatcaatcgctgaaaaggttgcagcacaatcgctcaatacccctctggcggtagtcctgaccggagacagagcagataattacacaaccgaagaatagttccctattcaaaaaaaagg

SEQ ID NO: 942 - protein, 167 aa, Corynebacterium glutamicum
EIPAGTKVEASDLGLQAIPTSLLPSTSYDSIDDVVGLVAASTLSSGEIATKPRFVGTELINSIATNVTDSSLVEEINMVPLSLAEPSVIPLLQHGDTISVVSQDPDTGLPENIAAGGTVILAGGTDPSTILIALPQSIAEKVAAQSLNTPLAVVLTGDRADNYTTEE

SEQ ID NO: 943 - DNA, 515 bp, Corynebacterium glutamicum
  CDS (1)..(492): FRXA02019
gctggcaccaaggttgaggcctctgaccttggacttcaggcaatccctacttccctactgcccagcacctcctacgattcgattgacgatgtagttgggctcgttgcggcctccacattaagttccggggaaatagccacaaagcctcgattcgtgggcaccgaattgataaactccattgcgacaaacgtcactgatagctctttggtggaagaaattaacatggttccactcagtttggctgaaccttccgtcatccccctactgcagcatggggacaccatttcggttgtttcccaagacccagacaccggtctcccagagaacattgctgcaggtggaacagtaattctggcgggtggtacagacccctcaaccatcttgattgcgcttccacaatcaatcgctgaaaaggttgcagcacaatcgctcaatacccctctggcggtagtcctgaccggagacagagcaaataattacacaaccgaagaatagttccctattcaaaaaaaagg

SEQ ID NO: 944 - protein, 164 aa, Corynebacterium glutamicum
AGTKVEASDLGLQAIPTSLLPSTSYDSIDDVVGLVAASTLSSGEIATKPRFVGTELINSIATNVTDSSLVEEINMVPLSLAEPSVIPLLQHGDTISVVSQDPDTGLPENIAAGGTVILAGGTDPSTILIALPQSIAEKVAAQSLNTPLAVVLTGDRANNYTTEE

SEQ ID NO: 945 - DNA, 891 bp, Corynebacterium glutamicum
  CDS (101)..(868): RXN02023
gatgtggcagcaattttgaagcagtacctgagcgagtaaccgcattcggggttatcgtgggacttccgaaatgtaactagagactagaggaggaaacacgatggctcctaaacaaactcccagcccagagaagaatcgaaacctggtgggaccagttctgcaacgtcggcagacagagggtacttttgatcaacgcttgctagaaatgcgcgctgatcacaattggaagcacgccgatccatggcgtgtactgcgtattcagtctgagtttgtggcgggttttgatgccctccacgagatgccaaaggccgtaaccgtctttggttccgcacgcattaaagaggatcacccgtactacaaggcgggtgtagaacttggtgaaaagctcgttgcagcggactacgcagttgtcaccggtggcggtccaggtctgatggaagcccccaataagggggcaagcgaggccaatggtttatcagttggtctgggcattgagttgccacatgaacagcatctgaacccttatgtggatttgggtctgaacttccggtacttcttcgcacgcaagaccatgttcctgaaatactcccaggcttttgtgtgtctgcctggtggtttcggcacgctcgatgagcttttcgaggtcctctgcatggtacaaaccggcaaggtacccaactttcccatcgtgctgatcggcactgagttctgggcaggtttggtggattggatccgtcaccgcctggtagaggaaggcatgatcgatgagaaggatgttgaccggatgttggtcactgatgacctggatcaggccgtcaaattcatcgtcgatgcacacgctggattggacgtagcgcgtctccacaattaagcagtggctacattaggtgt

SEQ ID NO: 946 - protein, 256 aa, Corynebacterium glutamicum
MAPKQTPSPEKNRNLVGPVLQRRQTEGTFDQRLLEMRADHNWKHADPWRVLRIQSEFVAGFDALHEMPKAVTVFGSARIKEDHPYYKAGVELGEKLVAADYAVVTGGGPGLMEAPNKGASEANGLSVGLGIELPHEQHLNPYVDLGLNFRYFFARKTMFLKYSQAFVCLPGGFGTLDELFEVLCMVQTGKVPNFPIVLIGTEFWAGLVDWIRHRLVEEGMIDEKDVDRMLVTDDLDQAVKFIVDAHAGLDVARLHN

SEQ ID NO: 947 - DNA, 891 bp, Corynebacterium glutamicum
  CDS (101)..(868): FRXA02023
gatgtggcagcaattttgaagcagtacctgagcgagtaaccgcattcggggttatcgtgggacttccgaaatgtaactagagactagaggaggaaacacgatggctcctaaacaaactcccagcccagagaagaatcgaaacctggtgggaccagttctgcaacgtcggcagacagagggtacttttgatcaacgcttgctagaaatgcgcgctgatcacaattggaagcacgccgatccatggcgtgtactgcgtattcagtctgagtttgtggcgggttttgatgccctccacgagatgccaaaggccgtaaccgtctttggttccgcacgcattaaagaggatcacccgtactacaaggcgggtgtagaacttggtgaaaagctcgttgctgctgactacgcagttgtcaccggtggcggtccaggtctgatggaagcccccaataagggggcaagcgaggccaatggtttatcagttggtctgggcattgagttgccacatgaacagcacctgaacccttatgtggatttgggtctgaacttccggtacttcttcgcacgcaagaccatgttcctgaaatactcccaggcttttgtgtgtctgcctggcggtttcggcacgctcgatgagcttttcgaggtcctctgcatggtacaaaccggcaaggtaaccaactttcccatcgtgctgatcggcactgagttctgggcaggtttggtggattggatccgtcaccgcctggtagaggaaggcatgatcgatgagaaggatgttgaccggatgttggtcactgatgacctggatcaggccgtcaaattcatcgtcgatgcacacgctggattggacgtagcgcgtctccacaattaagcagtggctacattaggtgt

SEQ ID NO: 948 - protein, 256 aa, Corynebacterium glutamicum
MAPKQTPSPEKNRNLVGPVLQRRQTEGTFDQRLLEMRADHNWKHADPWRVLRIQSEFVAGFDALHEMPKAVTVFGSARIKEDHPYYKAGVELGEKLVAADYAVVTGGGPGLMEAPNKGASEANGLSVGLGIELPHEQHLNPYVDLGLNFRYFFARKTMFLKYSQAFVCLPGGFGTLDELFEVLCMVQTGKVTNFPIVLIGTEFWAGLVDWIRHRLVEEGMIDEKDVDRMLVTDDLDQAVKFIVDAHAGLDVARLHN

SEQ ID NO: 949 - DNA, 693 bp, Corynebacterium glutamicum
  CDS (101)..(670): RXN02032
cttaaaaaggggctttatcggttcaggcgagcgagaccttcggcgttcacacttcgccggggtctattttttatgcccaggcacggctcataggagaaccatgccctttctacaaatctctctgctttccatcggtgtcgccgccgatgcgtttgcttgttccgttgtccgcggcaccgccattcaagtcaaccttttcaaacgcgcacttgttctcgcgggcatctttggtgtcttccaagcggcaatgcctttaatcggctggttcattggccgtttctttgctggaatcaccttcatcgctgaaattgatcactggatcgcttttgcactattgggtattgtcggcaccaaaatgatctgggatgccttccaacctgaagatgatgaaaccattgtcgatgacggccgcgttcaatttagaccagcaattatcctggggctagccaccagcattgacgcattagccgtaggcatgggcctggcattcgtggaagtttccatcctcaaagtggcactgtccatgggcagcatcaccttcgcactttcgcttgctggcgcctggatcggacaccatggtggaggaaagtttggcaagtgggctacgattcttggcggaataatcttgatcggaatcggcgcaaacatcgtctacgaacacctcagcgcgtaaccctcggcgcattatcctca

SEQ ID NO: 950 - protein, 190 aa, Corynebacterium glutamicum
MPFLQISLLSIGVAADAFACSVVRGTAIQVNLFKRALVLAGIFGVFQAAMPLIGWFIGRFFAGITFIAEIDHWIAFALLGIVGTKMIWDAFQPEDDETIVDDGRVQFRPAIILGLATSIDALAVGMGLAFVEVSILKVALSMGSITFALSLAGAWIGHHGGGKFGKWATILGGIILIGIGANIVYEHLSA

SEQ ID NO: 951 - DNA, 693 bp, Corynebacterium glutamicum; identical to SEQ ID NO: 949
  CDS (101)..(670): FRXA02032

SEQ ID NO: 952 - protein, 190 aa, Corynebacterium glutamicum; identical to SEQ ID NO: 950

SEQ ID NO: 953 - DNA, 863 bp, Corynebacterium glutamicum
  CDS (1)..(840): RXN02039
aaggcgtcgataagcaatttaagcttttggacgtccacctccaccaccgcacccctttggctcgtgggcacgcttgtgtggctggcggtgcaggcggtgatgcatgacggcgagctttaccatgtggaagttcccacgattgcgctggtcatcggctttggcgcgcagcttctgatcggtgtgatgagttatctactgccgtcgacgatgggtggcggcgcgagcgcggtgcggactggaacgcacattttaaacactgcggggctgtttaggtggacgctgatcaacggtggcctggcgatttggctgctcaccgacaattcgtggctgcgcgtcgtggtgtctctgctgagtatcggagcgttggcagtttttgtcattctgctgcccaaggctgtgcgggcgcagcgcggagtgatcaccaaaaagcgcgaaccaattactccgccggaggagcctcgactcaatcaaattaccgcgggaatctctgtgcttgccctgattttggcagcattcggtgggctcaaccccggtgttgcgccggtggcaagctcaaatgaagacgtctatgctgtgaccattaccgcaggtgacatggtgtttatccctgatgtgattgaagtgcctgctggtaaatcactcgaagtcacgatgctcaacgaagacgacatggtgcacgatctgaaatttgccaacggtgtgcaaaccggacgtgtggcgccaggtgatgaaattacggtgaccgtcggcgatatttccgaagacatggacggctggtgcaccatcgctgggcaccgcgcgcaaggaatggatctggaagtaaaggttgcggctccgaattaaccaagggctgctgaaaaact

SEQ ID NO: 954 - protein, 280 aa, Corynebacterium glutamicum
KASISNLSFWTSTSTTAPLWLVGTLVWLAVQAVMHDGELYHVEVPTIALVIGFGAQLLIGVMSYLLPSTMGGGASAVRTGTHILNTAGLFRWTLINGGLAIWLLTDNSWLRVVVSLLSIGALAVFVILLPKAVRAQRGVITKKREPITPPEEPRLNQITAGISVLALILAAFGGLNPGVAPVASSNEDVYAVTITAGDMVFIPDVIEVPAGKSLEVTMLNEDDMVHDLKFANGVQTGRVAPGDEITVTVGDISEDMDGWCTIAGHRAQGMDLEVKVAAPN

SEQ ID NO: 955 - DNA, 833 bp, Corynebacterium glutamicum
  CDS (1)..(810): FRXA02039
acgtccacctccaccaccgcacccctttggctcgtgggcacgcttgtgtggctggcggtgcaggcggtgatgcatgacggcgagctttaccatgtggaagttcccacgattgcgctggtcatcggctttggcgcgcagcttctgatcggtgtgatgagttatctactgccgtcgacgatgggtggcggcgcgagcgcggtgcggactggaacgcacattttaaacactgcggggctgtttaggtggacgctgatcaacggtggcctggcgatttggctgctcaccgacaattcgtggctgcgcgtcgtggtgtctctgctgagtatcggagcgttggcagtttttgtcattctgctgcccaaggctgtgcgggcgcagcgcggagtgatcaccaaaaagcgcgaaccaattactccgccggaggagcctcgactcaatcaaattaccgcgggaatctctgtgcttgccctgattttggcagcattcggtgggctcaaccccggtgttgcgccggtggcaagctcaaatgaagacgtctatgctgtgaccattaccgcaggtgacatggtgtttatccctgatgtgattgaagtgcctgctggtaaatcactcgaagtcacgatgctcaacgaagacgacatggtgcacgatctgaaatttgccaacggtgtgcaaaccggacgtgtggcgccaggtgatgaaattacggtgaccgtcggcgatatttccgaagacatggacggctggtgcaccatcgctgggcaccgcgcgcaaggaatggatctggaagtaaaggttgcggctccgaattaaccaagggctgctgaaaaact

SEQ ID NO: 956 - protein, 270 aa, Corynebacterium glutamicum
TSTSTTAPLWLVGTLVWLAVQAVMHDGELYHVEVPTIALVIGFGAQLLIGVMSYLLPSTMGGGASAVRTGTHILNTAGLFRWTLINGGLAIWLLTDNSWLRVVVSLLSIGALAVFVILLPKAVRAQRGVITKKREPITPPEEPRLNQITAGISVLALILAAFGGLNPGVAPVASSNEDVYAVTITAGDMVFIPDVIEVPAGKSLEVTMLNEDDMVHDLKFANGVQTGRVAPGDEITVTVGDISEDMDGWCTIAGHRAQGMDLEVKVAAPN

SEQ ID NO: 957 - DNA, 1506 bp, Corynebacterium glutamicum
  CDS (101)..(1483): RXN02044
ttactttcttaagtaatttaacgaatttggtctcgaaactgacctaaaaccccatgttgctagttggtgcaaaccaataatagctatagccccaatacaaatggtcaccccaatcatggggaattcgaactctatcctgggcatttaccgtcagaaaatccaaaatcgacatttggtttctacgctttttagggcatacttcccaatcgtgaccgagctgattattttattgattgttatcgtgacggcgctcgccttcgatttcacaaacggattccacgacaccggcaatgcgatggccacatccattgccacaggcgctctaaaacctaaagtcgccgtggcactatccgcctcactgaaccttgttggcgcattcctctctgtagaagttgcgacaactgttgccaaaggcgttgttgacctcgaccaattcgacctaagcaatgcctgggattcccaccagctcctgcttgtcgtcttcgccggcctcattggcgccatcgtctggaaccttctgacctggctgctaggcattccttccagctcctctcacgcacttttcggtggcctcattggcgccgcaattgcttcactcggtttcggcggagtggtgtgggaaggtgtcttgtccaagatgatcatcccagcattggctgcaccagttgttgcaggtctcgtggccgccatcggcactttcgccgtgtacagcatcacaaaggcagttggagacaacgagaagaaccgttacttccgctggggtcagatcggctccgcttccttggtttccctggcacacggcaccaacgatgcccagaagaccatgggcgttatcttcctttccctggttgccaccggtcacctgggaactgacgctgacatcccattctgggtcaaggctacatgtgcattggcaatcgcaatcggtacctacttgggtggttggcgcgttatccgcacactgggcaaaggcttggttgagattgattcccctcagggcatggcagcagaaacttcttctgcagcaatcattttgacttcttcccacttcggtatggcactgtccaccactcacgttgctactggctccatcatgggtaccggcattggacgtaaaggggcgaaggttcgttggtccgtcgcaggacgcatggcaatggcctgggttatcaccctccctgcctccgcgatcgttggcgttttctgctggtgggtagctcacggaattggtcttatcagctcagacctcctcggagtcctcgttgcattcgccattctggtcattctgtctggctacatttacgcccgttcccgtcgcgtgcctgttgatccaagcaacgtcaacgctgactggaatgaagaatcaaacagcgtggaacctgcaacaccttccgccccggctgcttctgagattacagaagctcctgccgctccagccgctcaagccgttcaagatctcaacaacgagaatgaggtaaccaagtaatgaacttcgctactattttc

SEQ ID NO: 958 - protein, 461 aa, Corynebacterium glutamicum
MVTPIMGNSNSILGIYRQKIQNRHLVSTLFRAYFPIVTELIILLIVIVTALAFDFTNGFHDTGNAMATSIATGALKPKVAVALSASLNLVGAFLSVEVATTVAKGVVDLDQFDLSNAWDSHQLLLVVFAGLIGAIVWNLLTWLLGIPSSSSHALFGGLIGAAIASLGFGGVVWEGVLSKMIIPALAAPVVAGLVAAIGTFAVYSITKAVGDNEKNRYFRWGQIGSASLVSLAHGTNDAQKTMGVIFLSLVATGHLGTDADIPFWVKATCALAIAIGTYLGGWRVIRTLGKGLVEIDSPQGMAAETSSAAIILTSSHFGMALSTTHVATGSIMGTGIGRKGAKVRWSVAGRMAMAWVITLPASAIVGVFCWWVAHGIGLISSDLLGVLVAFAILVILSGYIYARSRRVPVDPSNVNADWNEESNSVEPATPSAPAASEITEAPAAPAAQAVQDLNNENEVTK

SEQ ID NO: 959 - DNA, 384 bp, Corynebacterium glutamicum
  CDS (101)..(361): RXN02045
caccttccgccccggctgcttctgagattacagaagctcctgccgctccagccgctcaagccgttcaagatctcaacaacgagaatgaggtaaccaagtaatgaacttcgctactattttcggaagcatctttgaggtcaccctcgtgggcattttgctcggcgcaggccttccagccctttttgcattaggaatccgctttgctcacagcccttcttccaacggcaccaacgctcttggaaaaattgcttcaaccatctgctttgccatcattgcggttgctatcatcgctggcattctctgggtcaccaaagcaacgatctaccagtactctggtttcgacattttcggcactgaaggctaaaagcaccagctgcgaataac

SEQ ID NO: 960 - protein, 87 aa, Corynebacterium glutamicum
MNFATIFGSIFEVTLVGILLGAGLPALFALGIRFAHSPSSNGTNALGKIASTICFAIIAVAIIAGILWVTKATIYQYSGFDIFGTEG

SEQ ID NO: 961 - DNA, 384 bp, Corynebacterium glutamicum; identical to SEQ ID NO: 959
  CDS (101)..(361): FRXA02045

SEQ ID NO: 962 - protein, 87 aa, Corynebacterium glutamicum; identical to SEQ ID NO: 960

SEQ ID NO: 963 - DNA, 732 bp, Corynebacterium glutamicum
  CDS (101)..(709): RXN02049
tctacgcagtctccacagaccacgcagctttagatgcagtgtggcagtcctggcttcgcgatctggagttgccggagtttccttctggtggtttggactagtgcgctatctgacgctggccacaatcatcgcaggtctctccgggttcgtcgtcatcatcatcgctgcctgggcccttggtgattccagccaactttccgaagaattcaccgcctactggggtctgttctttgcaggaaccggagtgctgactgggttgacgcaggagacgacccgcgcggtgacggccggttctcgtggtggttctcgtggtgggcgtgctggttctgttgttggatttaggccgtttttgtttagcttcgtggttgcggcgatagtgctcgtggtgcttggcgcttcggcgccgctgtggatcggccagcttttaagtaatttgcaaggtgttggtgttgggctacttgctgtaggtcttgctagctacgcgatccaagcgacaatctccggcatttttgtccggctgccaattgtggaaagagtatgcctcgctgatttctttggacaccggcgtgcgcatggttttaactgttgccgcctggttgctgggttatcaattgctggcgttcttgatcatcaccgttgtgggatcaatatcctggctggtcatcgtgctgtgcttcggttcggtgcgttccgttttgggatcggttgctgatgtttcacggggcgttttca

SEQ ID NO: 964 - protein, 203 aa, Corynebacterium glutamicum
VRYLTLATIIAGLSGFVVIIIAAWALGDSSQLSEEFTAYWGLFFAGTGVLTGLTQETTRAVTAGSRGGSRGGRAGSVVGFRPFLFSFVVAAIVLVVLGASAPLWIGQLLSNLQGVGVGLLAVGLASYAIQATISGIFVRLPIVERVCLADFFGHRRAHGFNCCRLVAGLSIAGVLDHHRCGINILAGHRAVLRFGAFRFGIGC

SEQ ID NO: 965 - DNA, 570 bp, Corynebacterium glutamicum
  CDS (101)..(547): FRXA02049
tctacgcagtctccacagaccacgcagctttagatgcagtgtggcagtcctggcttcgcgatctggagttgccggagtttccttctggtggtttggactagtgcgctatctgacgctggccacaatcatcgcaggtctctccgggttcgtcgtcatcatcatcgctgcctgggcccttggtgattccagccaactttccgaagaattcaccgcctactggggtctgttctttgcaggaaccggagtgctgactgggttgacgcaggagacgacccgcgcggtgacggccggttctcgtggtggttctcgtggtgggcgtgctggttctgttgttggatttaggccgtttttgtttagcttcgtggttgcggcgatagtgctcgtggtgcttggcgcttcggcgccgctgtggatcggccagcttttaagtaatttgcaaggtgttggtgttgggctacttgctgtaggtcttgctagctacgcgatccaagcgacaatctccggcatttttgtccggctgccaattgtggaaaagagtatgcctcgctgatttctttggacaccggcgtg

SEQ ID NO: 966 - protein, 149 aa, Corynebacterium glutamicum
VRYLTLATIIAGLSGFVVIIIAAWALGDSSQLSEEFTAYWGLFFAGTGVLTGLTQETTRAVTAGSRGGSRGGRAGSVVGFRPFLFSFVVAAIVLVVLGASAPLWIGQLLSNLQGVGVGLLAVGLASYAIQATISGIFVRLPIVEKSMPR

SEQ ID NO: 967 - DNA, 918 bp, Corynebacterium glutamicum
  CDS (101)..(895): RXN02050
ctacttgctgtaggtcttgctagctacgcgatccaagcgacaatctccggcatttttgtccggctgccaattgtggaaagagtatgcctcgctgatttctttggacaccggcgtgcgcatggttttaactgttgccgcctggttgctgggttatcaattgctggcgttcttgatcatcaccgttgtgggatcaatatcctggctggtcatcgtgctgtgcttcggttcggtgcgttccgttttgggatcggttgctgatgtttcacggggcgttttcatccgacaggctctgcttgcgatggcagcatccggcgccacggcagtgctgattactggtttcccgaccctgctgaaattcacgaacccttcagcggttgcaggaggggtttcgatggccgctgtttcctacgccgtcatcctgacccgcgctcccctgctggttccgctgcagcaattccaatcggcgatcatcgttcgttttgtcaaaggtacgtccggtccattgaaaactttggcgggtccgttggcaattgtgtgggcagtcggacttgttggagctggtcttgcatggttagttggcccatggatcctggacgttgtactccaaaaggaactcttcgcggtccctggctggctactcgcgatgctcaccttaggcgccaccaccaccgcttcattgatggtgtccggctgcgcggcgatcgcctttgaacgtcacgggatctatctcaccggatgggttgttgccactgttgttgccgtcggattcttgctgggaccttttgatttgggcgtcgctgctggccttgcgctcattgttggcccactctgcggtttgctggtacacatgggagcgtttgttggtggggatcggaatcgggttttgactgcgggatagtttggtttgattgggggatt

SEQ ID NO: 968 - protein, 265 aa, Corynebacterium glutamicum
LDTGVRMVLTVAAWLLGYQLLAFLIITVVGSISWLVIVLCFGSVRSVLGSVADVSRGVFIRQALLAMAASGATAVLITGFPTLLKFTNPSAVAGGVSMAAVSYAVILTRAPLLVPLQQFQSAIIVRFVKGTSGPLKTLAGPLAIVWAVGLVGAGLAWLVGPWILDVVLQKELFAVPGWLLAMLTLGATTTASLMVSGCAAIAFERHGIYLTGWVVATVVAVGFLLGPFDLGVAAGLALIVGPLCGLLVHMGAFVGGDRNRVLTAG

SEQ ID NO: 969 - DNA, 495 bp, Corynebacterium glutamicum
  CDS (101)..(472): FRXA02050
cgcgctcccctgctggttccgctgcagcaattccaatcggcgatcatcgttcgttttgtcaaaggtaccgtccggtccattgaaaactttggcgggtccgttggcaattgtgtgggcagtcggacttgttggagctggtcttgcatggttagttggcccatggatcctggacgttgtactccaaaaggaactcttcgcggtccctggctggctactcgcgatgctcaccttaggcgccaccaccaccgcttcattgatggtgtccggctgcgcggcgatcgcctttgaacgtcacgggatctatctcaccggatgggttgttgccactgttgttgccgtcggattcttgctgggaccttttgatttgggcgtcgctgctggccttgcgctcattgttggcccactctgcggtttgctggtacacatgggagcgtttgttggtggggatcggaatcgggttttgactgcgggatagtttggtttgattgggggatt

SEQ ID NO: 970 - protein, 124 aa, Corynebacterium glutamicum
LAIVWAVGLVGAGLAWLVGPWILDVVLQKELFAVPGWLLAMLTLGATTTASLMVSGCAAIAFERHGIYLTGWVVATVVAVGFLLGPFDLGVAAGLALIVGPLCGLLVHMGAFVGGDRNRVLTAG

SEQ ID NO: 971 - DNA, 618 bp, Corynebacterium glutamicum
  CDS (101)..(595): RXN02059
tcgggaaattccactcatgaacgcctagtctacgggaaccatttcaccagcgtgtacgttgtaaatgtgaactgaaaaagtgaaaaggaagatgataaagatgactcaaccacggcccgatgccgcatctgtgtcgctggaaaagaagcgcccagaaggatggccagtgggaagctttgaaacatacccagaagcccaagcagcagtggatttgctcagtgataatgcattccccgtcaccgaattgaccattgttggtgtggacctgattgaagtggaacgcgttacaggtcgtctcacgtggggtcgtgtgattgccggaggaatggcatctggcgcatggttgggtctgttctttggcattgtcatggccttgatgtctggattctggttctcttccatcgcagcgggaataggtatgggtttggtgtttggcattgtcggtgcagcagttccttatgctgcttccaaaggcaagcgggactttacctcttcaactcaaattgtggcggggcgctatgatgtgatttgttccccagaacgtgctcgggaagctcgagacatgattgccctgaaaactcgagatctccgccaataagttaaactaacgcctatgaa

SEQ ID NO: 972 - protein, 165 aa, Corynebacterium glutamicum
MTQPRPDAASVSLEKKRPEGWPVGSFETYPEAQAAVDLLSDNAFPVTELTIVGVDLIEVERVTGRLTWGRVIAGGMASGAWLGLFFGIVMALMSGFWFSSIAAGIGMGLVFGIVGAAVPYAASKGKRDFTSSTQIVAGRYDVICSPERAREARDMIALKTRDLRQ

SEQ ID NO: 973 - DNA, 618 bp, Corynebacterium glutamicum; identical to SEQ ID NO: 971
  CDS (101)..(595): FRXA02059

SEQ ID NO: 974 - protein, 165 aa, Corynebacterium glutamicum; identical to SEQ ID NO: 972

SEQ ID NO: 975 - DNA, 615 bp, Corynebacterium glutamicum
  CDS (101)..(592): RXN02066
ggaacttatcacaggcgacatccgttttgagtagtaggtatcttggataagaagttacccacatccttgaaagtcgagacacaggaggtcatcggaagatatgttcaattccgacaccaccgcgaatctccaagctaaaagtcgagatcgtgcaggatctaaagcaaagcgcagcaggccaagttttgattcagtagcgcgggatgttttggatgttcgaacaaaaacagcacaagttaaaaacaaggctaaagagttttcctctgttgatcacctttcagcagacgccgcagccatgtttgtagacaatgaactgtcccgtggcgccatgcatcgcgccaggctgcacattgtgcactgcgctgaatgtagggaagagattaaccgtcagcgggaaaccgttgattatctccgctcagagtgcaaaaacgaagaagtgtccgccccaatggacctcaaagcacggcttgccagcctcgccactgagtgcatgcctggccctggcgcagagaatttagcaatgcagcgcccagagtcttttgtggctaaagttgagtccgtagtgcgcgcagttcgtaagaaccaaggccgctaatttttaatccttatttacat

SEQ ID NO: 976 - protein, 164 aa, Corynebacterium glutamicum
MFNSDTTANLQAKSRDRAGSKAKRSRPSFDSVARDVLDVRTKTAQVKNKAKEFSSVDHLSADAAAMFVDNELSRGAMHRARLHIVHCAECREEINRQRETVDYLRSECKNEEVSAPMDLKARLASLATECMPGPGAENLAMQRPESFVAKVESVVRAVRKNQGR

SEQ ID NO: 977 - DNA, 615 bp, Corynebacterium glutamicum; identical to SEQ ID NO: 975
  CDS (101)..(592): FRXA02066

SEQ ID NO: 978 - protein, 164 aa, Corynebacterium glutamicum; identical to SEQ ID NO: 976

SEQ ID NO: 979 - DNA, 579 bp, Corynebacterium glutamicum
  CDS (101)..(556): RXN02067
taaagttgagtccgtagtgcgcgcagttcgtaagaaccaaggccgctaatttttaatccttatttacattttctgaaagaccggtctgatgttttctagcgtgggttggggagagatcttcctcttagtcgttgtgggccttgttgtcatcggcccggaacggttgcctcgtttgatccaggacgcacgcgctgcgctgctcgctgcacgtaccgctatcgacaatgcaaagcagtcgttggacagtgattttggttcggaatttgatgaaatccgaaagccactaacccaggttgcacagtacagccggatgagccccaagacggccatcactaaggcgttatttgataatgattcctcgttcctggatgactttgatccaaagaagatcatggccgaaggaacagaaggcgaagctcagcgcaacaagcaggcagctgacaacaatgcgaatgtggtggaacgtccagctgatggttccaccgcacgcccaacgcaaaacgatccaaaagacggcccgaattactcaggtggcgtctcttggaccgatattatttagcttttatttaacgccaagcc

SEQ ID NO: 980 - protein, 152 aa, Corynebacterium glutamicum
VGWGEIFLLVVVGLVVIGPERLPRLIQDARAALLAARTAIDNAKQSLDSDFGSEFDEIRKPLTQVAQYSRMSPKTAITKALFDNDSSFLDDFDPKKIMAEGTEGEAQRNKQAADNNANVVERPADGSTARPTQNDPKDGPNYSGGVSWTDII

SEQ ID NO: 981 - DNA, 579 bp, Corynebacterium glutamicum; identical to SEQ ID NO: 979
  CDS (101)..(556): FRXA02067

SEQ ID NO: 982 - protein, 152 aa, Corynebacterium glutamicum; identical to SEQ ID NO: 980

SEQ ID NO: 983 - DNA, 912 bp, Corynebacterium glutamicum
  CDS (101)..(889): RXN02075
agttttcgaataccgtctacgtggagctttgcggaaaatacgcaccgagacctaggcgcgccatacgcatggttcacaggatttcagtacgattaaccccatgtacaaggtcttcgaagcactggatgatttagttcaagccgttcaacgcgcatacggcgttcccatgaccggaaattgcgtggttccccgtcaggaagtgcttgcgcttctcgatgatttacgtgatgcgcttcctgtagaacttgatgatgcacaagatgtgctggaccaccgtgatggtgtgatccgtgaagctgaagaaaaggccattgccttggtcgacgatgcagaaaacgaggcccgaaacctccttgcacgcgcaactgaggagtcagatgccatggtggaagacgccaccaagcatgcgcattctgtcgttgctaaggctaatgacacagcggatcgcatcgtgagtgacgctcgtcgagaagcaaacagcgtcaccgagcgcgcccaggctgaatctgagcgcctggtcaactccggcaatgatgcgtatcgccgcgcggttgctgaaggccaggccgagcaggatcgcctggtcagcgaggcagaagtggtgcgtcgctccacggaagaagcacaccgcattgtggatgcagcgcacgctgactccaacaagctgcgcaatgaatgcgatgactacgtggataccaagttggcagagtttgaaacctcgctgtccaccacgttgcgttctgtcactgctgatcgttccgcactacgccgaggagctggagctactggccgcgagctgcgcgatgagcaaccggcagcgcgtggtgaatatgagcgggactacgagcgtgattatgaacgaggctacgaacgcgacgatcgagactactagtttccaagaaaccatttagg

SEQ ID NO: 984 - protein, 263 aa, Corynebacterium glutamicum
MYKVFEALDDLVQAVQRAYGVPMTGNCVVPRQEVLALLDDLRDALPVELDDAQDVLDHRDGVIREAEEKAIALVDDAENEARNLLARATEESDAMVEDATKHAHSVVAKANDTADRIVSDARREANSVTERAQAESERLVNSGNDAYRRAVAEGQAEQDRLVSEAEVVRRSTEEAHRIVDAAHADSNKLRNECDDYVDTKLAEFETSLSTTLRSVTADRSALRRGAGATGRELRDEQPAARGEYERDYERDYERGYERDDRDY

SEQ ID NO: 985 - DNA, 657 bp, Corynebacterium glutamicum
  CDS (101)..(634): RXN02076
tagtttccaagaaaccatttaggctttttcacctttccgtctagcgatcctcatctgatgtatgtagtcacgatgaggtacgagtaggatcttcctggtcatgaaatctccatttatttttgatgtcgccgcactccttcgtggaagtgcccttccggaacacctcacccaatcaggtccaagcccgacccgcattggtccggaaatgatcgcgatccccgagggcggaaaagttatcgtagaagcccagatcattccactcggtggaggcctggccgtcgaagcagatatcgaagcgcagcttctgggacagtgctcccgctgcctccgcgaactcaccccaaccaagacgctgcacgtctctgaggtttttgctgccgatccagactttgttactggtgaagatgcagcagatgacgaagatgagctgccaatggttaaccaagaccagattgatctgcttcagtctgtcattgatgaagctggtctgaccttgccgtttaaccctgtctgcgaagaacttgggtacggcgcatgccaggatgatgaaacgccagctcctgacggtgtctctgaagaagtagaagacgaggaaaaggtcgatccgcgctgggctggtttggagaagttcctgtgagcaggaaaaagaatcgcctc

SEQ ID NO: 986 - protein, 178 aa, Corynebacterium glutamicum
MKSPFIFDVAALLRGSALPEHLTQSGPSPTRIGPEMIAIPEGGKVIVEAQIIPLGGGLAVEADIEAQLLGQCSRCLRELTPTKTLHVSEVFAADPDFVTGEDAADDEDELPMVNQDQIDLLQSVIDEAGLTLPFNPVCEELGYGACQDDETPAPDGVSEEVEDEEKVDPRWAGLEKFL

SEQ ID NO: 987 - DNA, 657 bp, Corynebacterium glutamicum; identical to SEQ ID NO: 985
  CDS (101)..(634): FRXA02076

SEQ ID NO: 988 - protein, 178 aa, Corynebacterium glutamicum; identical to SEQ ID NO: 986

SEQ ID NO: 989 - DNA, 840 bp, Corynebacterium glutamicum
  CDS (101)..(817): RXN02094
ttccacctctacaccggagttcttccaaccaacgaccagatcattgctgcggaggagttctccaagtaaatttctctcccctatttttaggaggcaccacatggctgaacacaacgccatcatcacggatgcagtacattccgaccccgctgttttagaagacaacgccgggttcagcggaaagtacctaatccgtgccctggacaaggcagctcatatgcaaacaggtgccatcgagggatacatttcttggcttcggaagcacaatcctgagaaaacaccggcgcagctgcaggtactcgtcgacaagcattttatgcgccttgccaccggctctggcgctggtgtgggcatggctgcggccgtgccaggcattggctttgtcacgggtgctcttgccgttggtgctgaatcgttggtgtttttggatgctgctgcgttttacaccatggcatccgcgcacctgcgtggcatcgacatccgccatcctgaacgccgacgtggtttgattttggtggttctgctgggcaccgcaggcaaagccattgttgacgcaggcgtcggtgatttatccaagaaaaaccacgcgccgggcattgcgatttcccggtttaatatcggtggcttgatggaagtcaacggccgactgatgcgctacgcagtgaaggaagtaagcaagcgtttccgttcggcattgattggcaaaattctgccgtttggtatcggtgcggtgctgggcacgatggccaaccgcaaaattgccaagaggactgtcggaaacgcatacgactctcttggtcctctccccacccatttttaagtactcaagacccttccaac

SEQ ID NO: 990 - protein, 239 aa, Corynebacterium glutamicum
MAEHNAIITDAVHSDPAVLEDNAGFSGKYLIRALDKAAHMQTGAIEGYISWLRKHNPEKTPAQLQVLVDKHFMRLATGSGAGVGMAAAVPGIGFVTGALAVGAESLVFLDAAAFYTMASAHLRGIDIRHPERRRGLILVVLLGTAGKAIVDAGVGDLSKKNHAPGIAISRFNIGGLMEVNGRLMRYAVKEVSKRFRSALIGKILPFGIGAVLGTMANRKIAKRTVGNAYDSLGPLPTHF

SEQ ID NO: 991 - DNA, 840 bp, Corynebacterium glutamicum; identical to SEQ ID NO: 989
  CDS (101)..(817): FRXA02094

SEQ ID NO: 992 - protein, 239 aa, Corynebacterium glutamicum; identical to SEQ ID NO: 990

SEQ ID NO: 993 - DNA, 1245 bp, Corynebacterium glutamicum
  CDS (101)..(1222): RXN02104
catggattcccatttggagccttatttacacaggccacctggcttgtttcccaccgcgatgtgccacaataacgccataacagaaaggcatactgacacaatgtccaactcccccaccgacgtttcaacgagcgcacctcgaattatgatcgcgccagattcctacaaaggaaccgctaccgcatcagaagctgcgcaatacttaggcgaaggcgtgttggaaattttgcccaacgcctccattacgttggcacccatggccgacggtggcgaaggaacatcctcagttttcggcgggcaggtcataacattacccacgacaaatgccgcgggacgcctcaccgaagccagctacaccttagattccgaaacaaacactgcctacattgacatcgccgcagcctccggtttgcccgccgttgcagacgatctagtccccaccaccggcgatacctacggcaccggcgttttgatcgcagacgcggtcacccgtggcgcaactcgcattgctttaggccttggcggatcagccacaactgacgccggctcaggaattctcatcgccctcggcgccgtcccacgcaacaaagagggctacgcactacgaaccggtggcgccgacctcatcaacctcgattacatcgataccgccgaactcaacatccccgcagccgccgtcgaatggatcctgctcaccgatgtcgacgcccccgccaccggcccgcagggcgcggccaccgtattcgggccccaaaaaggtgccaccgaaaaagacatttcgcttctcgacgccgccctccaccacgcctgcgcccaactggaagttgatggcacaaagccaggtatgggcgcagccgggggcattgcaatcggactgacgtggctgtccaccctcatgcacggcaacgaccaacagatccatatcctccccggcgcgccactgattgcccgctccaacggaatcgaggatgcgctgccagaaactgacttgttgatcaccggtgaaggccgactagattcccaatcgttcaccggaaaggttgtgggcaccctccacggtttagctaaagcccacgatgtggatctcgctgttgcggccggcatcgtggaaggcggtattcccgatgatttcctagcggtagaaatgattaaatcctccgacgttgcagcacaattacgtgatgcaggccgaaggatcgctcaagaatacgtagctcaaaactagcgaaggatctccacagtcca

SEQ ID NO: 994 - protein, 374 aa, Corynebacterium glutamicum
MSNSPTDVSTSAPRIMIAPDSYKGTATASEAAQYLGEGVLEILPNASITLAPMADGGEGTSSVFGGQVITLPTTNAAGRLTEASYTLDSETNTAYIDIAAASGLPAVADDLVPTTGDTYGTGVLIADAVTRGATRIALGLGGSATTDAGSGILIALGAVPRNKEGYALRTGGADLINLDYIDTAELNIPAAAVEWILLTDVDAPATGPQGAATVFGPQKGATEKDISLLDAALHHACAQLEVDGTKPGMGAAGGIAIGLTWLSTLMHGNDQQIHILPGAPLIARSNGIEDALPETDLLITGEGRLDSQSFTGKVVGTLHGLAKAHDVDLAVAAGIVEGGIPDDFLAVEMIKSSDVAAQLRDAGRRIAQEYVAQN

SEQ ID NO: 995 - DNA, 443 bp, Corynebacterium glutamicum
  CDS (1)..(420): FRXA02104
cacgcctgcgcccaactggaagttgatggcacaaagccaggtatgggcgcagccgggggcattgcaatcggactgacgtggctgtccaccctcatgcacggcaacgaccaacagatccatatcctccccggcgcgccactgattgcccgctccaacggaatcgaggatgcgctgccagaaactgacttgttgatcaccggtgaaggccgactagattcccaatcgttcaccggaaaggttgtgggcaccctccacggtttagctaaagcccacgatgtggatctcgctgttgcggccggcatcgtggaaggcggtattcccgatgatttcctagcggtagaaatgattaaatcctccgacgttgcagcacaattacgtgatgcaggccgaaggatcgctcaagaatacgtagctcaaaactagcgaaggatctccacagtcca

SEQ ID NO: 996 - protein, 140 aa, Corynebacterium glutamicum
HACAQLEVDGTKPGMGAAGGIAIGLTWLSTLMHGNDQQIHILPGAPLIARSNGIEDALPETDLLITGEGRLDSQSFTGKVVGTLHGLAKAHDVDLAVAAGIVEGGIPDDFLAVEMIKSSDVAAQLRDAGRRIAQEYVAQN

SEQ ID NO: 997 - DNA, 553 bp, Corynebacterium glutamicum
  CDS (101)..(553): FRXA02071
catggattcccatttggagccttatttacacaggccacctggcttgtttcccaccgcgatgtgccacaataacgccataacagaaaggcatactgacacaatgtccaactcccccaccgacgtttcaacgagcgcacctcgaattatgatcgcgccagattcctacaaaggaaccgctaccgcatcagaagctgcgcaatacttaggcgaaggcgtgttggaaattttgcccaacgcctccattacgttggcacccatggccgacggtggcgaaggaacatcctcagttttcggcgggcaggtcataacattacccacgacaaatgccgcgggacgcctcaccgaagccagctacaccttagattccgaaacaaacactgcctacattgacatcgccgcagcctccggtttgcccgccgttgcagacgatctagtccccaccaccggcgatacctacggcaccggcgttttgatcgcagacgcggtcacccgtggcgcaactcgcattgctttaggccttggcggatcagccacaactgacgccggctcagga

SEQ ID NO: 998 - protein, 151 aa, Corynebacterium glutamicum
MSNSPTDVSTSAPRIMIAPDSYKGTATASEAAQYLGEGVLEILPNASITLAPMADGGEGTSSVFGGQVITLPTTNAAGRLTEASYTLDSETNTAYIDIAAASGLPAVADDLVPTTGDTYGTGVLIADAVTRGATRIALGLGGSATTDAGSG

SEQ ID NO: 999 - DNA, 465 bp, Corynebacterium glutamicum
  CDS (101)..(442): RXN02107
aagaagtagagctcagcgatgaagatttcgcggcaggccacgacctagtaaaaaccaaatacgccaccgaggagtggactaagcgagttcaatagtttctatggatctgcacaaggtagctgcagcgcacgcggcgactcttcccctgagcaccaaagagtttcctttcggacccgagcacgaagtgtacaaagtgcggggcaaggtatttttgctgctcacgatactaaatgatgagccgattatcacgctgaaatcagaccccgagattggcgcttcactacgcagtggcttccccaccatccaggctggatatcacatgaacaaagtgcactggctgagcattagcgatggtgaacggatcacgaaagacttcatcgaaggtctcgtggaagagtcctatgaactggtaatttccaccttgccgaagtataaaaggccttaacttggttgcttgcgggtggc

SEQ ID NO: 1000 - protein, 114 aa, Corynebacterium glutamicum
MDLHKVAAAHAATLPLSTKEFPFGPEHEVYKVRGKVFLLLTILNDEPIITLKSDPEIGASLRSGFPTIQAGYHMNKVHWLSISDGERITKDFIEGLVEESYELVISTLPKYKRP

SEQ ID NO: 1001 - DNA, 465 bp, Corynebacterium glutamicum; identical to SEQ ID NO: 999
  CDS (101)..(442): FRXA02107

SEQ ID NO: 1002 - protein, 114 aa, Corynebacterium glutamicum; identical to SEQ ID NO: 1000

SEQ ID NO: 1003 - DNA, 732 bp, Corynebacterium glutamicum
  CDS (101)..(709): RXN02108
aagacttcatcgaaggtctcgtggaagagtcctatgaactggtaatttccaccttgccgaagtataaaaggccttaacttggttgcttgcgggtggcaagatgggtgatatgaaaattacccgccacatccatgcatgcgttgagatctcacagggaaacgatcgaatcattattgatcccggtacttttggcgccccagatttatgtggcgcgaccatcctggtcacccacaatcatgccgatcacgttgatcccgagttgctcaagcccggcatgacgatttacgcgcctcgatcagtagcacattcaattccagtagaatgccacatcgtggaacacggccgaaactttaccgttgggtccctatccgttgaggttcttggttctgaacatgcgatgctcacccattccatgccgatcgcggaaaacgttggatacttaatcaacggccgagtgctccaccccggcgataccttccaacccattaaagatgtcgaactcgccctggttcctgtcaacggcccctgggtgaaaatgctggatgtggaaggctatttgaagaaatttccaccaaagcgtttcatcggcattcacgatggcattgttaatgatcgcggtttggcgatcaacaagaagttcttaacgcatcttggtgaaacctatggctcggaatactcgccgcttgaagagggagagtcgttggaaatttagattcttggtttagattcttg

SEQ ID NO: 1004 - protein, 203 aa, Corynebacterium glutamicum
MGDMKITRHIHACVEISQGNDRIIIDPGTFGAPDLCGATILVTHNHADHVDPELLKPGMTIYAPRSVAHSIPVECHIVEHGRNFTVGSLSVEVLGSEHAMLTHSMPIAENVGYLINGRVLHPGDTFQPIKDVELALVPVNGPWVKMLDVEGYLKKFPPKRFIGIHDGIVNDRGLAINKKFLTHLGETYGSEYSPLEEGESLEI

SEQ ID NO: 1005 - DNA, 558 bp, Corynebacterium glutamicum
  CDS (101)..(535): FRXA02108
ttgatcccggtacttttggcgccccagatttagatgggcgaccatcctgatcacccacaatcatgccgatcacgttgatcccgagttgctcaagcccggcatgacgatttacgcgcctcgatcagtagcacattcaattccagtagaatgccacatcgtggaacacggccgaaactttaccgttgggtccctatccgttgaggttcttggttctgaacatgcgatgctcacccattccatgccgatcgcggaaaacgttggatacttaatcaacggccgagtgctccaccccggcgataccttccaacccattaaagatgtcgaactcgccctggttcctgtcaacggcccctgggtgaaaatgctggatgtggaaggctatttgaagaaatttccaccaaagcgtttcatcggcattcacgatggcattgttaatgatcgcggtttggcgatcaacaagaagttcttaacgcatcttggtgaaacctatggctcggaatactcgccgcttgaagagggagagtcgttggaaatttagattcttggtttagattcttg

SEQ ID NO: 1006 - protein, 145 aa, Corynebacterium glutamicum
MTIYAPRSVAHSIPVECHIVEHGRNFTVGSLSVEVLGSEHAMLTHSMPIAENVGYLINGRVLHPGDTFQPIKDVELALVPVNGPWVKMLDVEGYLKKFPPKRFIGIHDGIVNDRGLAINKKFLTHLGETYGSEYSPLEEGESLEI

SEQ ID NO: 1007 - DNA, 509 bp, Corynebacterium glutamicum
  CDS (1)..(486): RXN02114
tccatcggctacgcctggaccaccgcatttcacgcactcacaccaggccttggcggcatcgccattggtatttggctgctcggtggtgtgctcggtgggttggttatccgcaagccgggtgccgcaattttcgttgaagtagtggccgcatgtgtctctgcagcgcttgcttcacagtttggtatctccaccatttactccggcttggcgcagggaatcggcgctgaaatcatcttcgcgctgttcctctaccgtcgctacagcctgcccaccaccatgcttgcaggtatgggcgcaggtggcggcgcaattttcctggaaatgttcttctacggaaacctcgcaaagacgatgtccttcaacatcatctattccaccactgtccttatttccggtgcgatccttgccggcctgctcagctggtacctggtccgcgcgttggcgaggactggtgcacttgatcgtttcgccgctggccgcgaggtataaatgaccaccgcacttggaac

SEQ ID NO: 1008 - protein, 162 aa, Corynebacterium glutamicum
SIGYAWTTAFHALTPGLGGIAIGIWLLGGVLGGLVIRKPGAAIFVEVVAACVSAALASQFGISTIYSGLAQGIGAEIIFALFLYRRYSLPTTMLAGMGAGGGAIFLEMFFYGNLAKTMSFNIIYSTTVLISGAILAGLLSWYLVRALARTGALDRFAAGREV

SEQ ID NO: 1009 - DNA, 509 bp, Corynebacterium glutamicum; identical to SEQ ID NO: 1007
  CDS (1)..(486): FRXA02114

SEQ ID NO: 1010 - protein, 162 aa, Corynebacterium glutamicum; identical to SEQ ID NO: 1008

SEQ ID NO: 1011 - DNA, 828 bp, Corynebacterium glutamicum
  CDS (101)..(805): RXN02121
ccgggaaatcttcaggcgtctcctcccatatgctgctgacaaattccagaacaggatcgttgggataccttcgagacaaacttccgaaagctccgcaaccatgatcacctcaccatttgagcgcgagctgaagctgctcaacgagggggaactgggtattgtccagcagttggtggaatcaagcaacatcggattcatcgtcgatcttgaattagatggcgattatgggtgggcggtctacaaaccggaattgggggagcaacccctgtgggatttccctcctggcctgtacaaacgtgaacgtgcagcctttgtgatcagtgagtttttgggttggaacatcgtgcctccaacggtgatcatgcacgatgccccggctggtgtgggctcggtgcagtggtttattgaaaacaatggcgaacactattttccactgtttgacacccgcgctgacctgcatccgcagtttgtccgcatggctgtgtttgatctgttgtgcaacaacactgaccggaaagcgggccatgtgttgttagacggcgatcatatttggggcatcgatcacgggttgtgtttttccgtcgaaccgaagctgcgcacggtgatttgggatttcgcaggctgcaccattccagatgacttggtgacagatgttgagcagcttttggaggacgtcccggaagaacttcatcagcttcttcatcccgcagaaattgatgcgctgcagcgccgtgcctcaagaatcagcaggttaccgttccttccgcaggcgaaatcgcatcgtcaattcccttggccacttgtttgagtaggctggcgggcaggtgc

SEQ ID NO: 1012 - protein, 235 aa, Corynebacterium glutamicum
MITSPFERELKLLNEGELGIVQQLVESSNIGFIVDLELDGDYGWAVYKPELGEQPLWDFPPGLYKRERAAFVISEFLGWNIVPPTVIMHDAPAGVGSVQWFIENNGEHYFPLFDTRADLHPQFVRMAVFDLLCNNTDRKAGHVLLDGDHIWGIDHGLCFSVEPKLRTVIWDFAGCTIPDDLVTDVEQLLEDVPEELHQLLHPAEIDALQRRASRISRLPFLPQAKSHRQFPWPLV

SEQ ID NO: 1013 - DNA, 828 bp, Corynebacterium glutamicum
  CDS (101)..(805): FRXA02121
ccgggaaatcttcaggcgtctcctcccatatgctgctgacaaattccagaacaggatcgttgggataccttcgagacaaacttccgaaagctccgcaaccatgatcacctcaccatttgagcgcgagctgaagctgctcaacgagggggaactgggtattgtccagcagttggtggaatcaagcaacatcggattcatcgtcgatcttgaattagatggcgattatgggtgggcggtctacaaaccggaattgggggagcaacccctgtgggatttccctcctggcctgtacaaacgtgaacgtgcagcctttgtgatcagtgagtttttgggttggaacatcgtgcctccaacggtgatcatgcacgatgccccggctggtgtgggctcggtgcagtggtttattgaaaacaatggcgaacactattttccactgtttgacacccgcgctgacctgcatccgcagtttgtccgcatggctgtgtttgatctgttgtgcaacaacactgaccggaaatcgggccatgtgttgctagacggcgatcatatttggggcatcgatcacgggttgtgtttttccgtcgaaccgaagctgcgcacggtgatttgggatttcgcaggctgcaccattccagatgacttggtgacagatgttgagcagcttttggaggacgtcccggaagaacttcatcagcttcttcatcccgcagaaattgatgcgctgcagcgccgtgcctcaagaatcagcaggttaccgttccttccgcaggcgaaatcgcatcgtcaattcccttggccacttgtttgagtaggctggcgggcaggtgc

SEQ ID NO: 1014 - protein, 235 aa, Corynebacterium glutamicum
MITSPFERELKLLNEGELGIVQQLVESSNIGFIVDLELDGDYGWAVYKPELGEQPLWDFPPGLYKRERAAFVISEFLGWNIVPPTVIMHDAPAGVGSVQWFIENNGEHYFPLFDTRADLHPQFVRMAVFDLLCNNTDRKSGHVLLDGDHIWGIDHGLCFSVEPKLRTVIWDFAGCTIPDDLVTDVEQLLEDVPEELHQLLHPAEIDALQRRASRISRLPFLPQAKSHRQFPWPLV

SEQ ID NO: 1015 - DNA, 465 bp, Corynebacterium glutamicum
  CDS (101)..(442): RXN02138
tcactcgccggagatccgtaaaaaggggagtacactgcaagcctatgatgtcccggcctaaaagtaattcaaagggccaacagttaaggagactaaagcgatgaccgctccatcaaccaacaccggtgttatcttgaccgagtccgcagcgtccaaagctaaggcactcatcgatcaggaaggccgcgacgacctctctctgcgtatcgccgttcagcctggcggctgctctggccttcgttaccagctttacttcgacgaccgcacccttgatggcgataaggaagacatcgtcggtggcgttcgccttgtcgttgacaagatgagcaccccatacttgctcggcgctcagatcgacttcgctgacaccatcgagcagcagggcttcaccatcgacaacccaaacgcaggcagctcttgcgcttgtggtgactccttcaactaaagagattccgttatgtagga

SEQ ID NO: 1016 - protein, 114 aa, Corynebacterium glutamicum
MTAPSTNTGVILTESAASKAKALIDQEGRDDLSLRIAVQPGGCSGLRYQLYFDDRTLDGDKEDIVGGVRLVVDKMSTPYLLGAQIDFADTIEQQGFTIDNPNAGSSCACGDSFN

SEQ ID NO: 1017 - DNA, 465 bp, Corynebacterium glutamicum; identical to SEQ ID NO: 1015
  CDS (101)..(442): FRXA02138

SEQ ID NO: 1018 - protein, 114 aa, Corynebacterium glutamicum; identical to SEQ ID NO: 1016

SEQ ID NO: 1019 - DNA, 1311 bp, Corynebacterium glutamicum
  CDS (101)..(1288): RXN02151
atgagcgcatcgtcttttttaggagttgtccgccaccgtgaaaactggaaacttaaacccagccccacagcaggtgacggctccccagaacaaggctcgtatggattggccagacatcgccaagggaatatccatcctaggtgtcgtgttactacacgtgtcgttggcaattccaggtggccaggacaccatgatgtcccacctgaacgcactgcttgatccacttcggatgccattattttttatggtgagtggattttttgcagttaaagttctgaatcaaagctttggtgaacttttccgcgggcgactgtggttctacctggttccatatttgctgtggactccagtgaatctttatctacaccgcctcgagggcacagtttttaccggtagagcaccgggaacatgggaatggtacagcggctcgatgctctcggccaccaatatgtactggttcctctacttcttggtcatcttcaacctatttttatgggcaacgagaaaactcccagcttgggcaattgtggcgttggtggcctcactgtggctacttatgccggcttatagcgagattgagattctacgcaagtccattatttacttgcctacattcctcattggcgcttacttccgcccactgatttcgcgttttgcagaagccgcaacaaggccaaaagcaatagtgtttgcagcggtcctttatgtctcgggacttgctttgggcgtgatctcaaatgggctgcgcgacagcgaaaaccatggcgcaagcgtgctgtggctgatgaacctccgcgatacttttgctcatgcactcggcggcaacctcactggattcgatatggatcaccttcctggaatgatcattcggattgtttccctgcctgcaggaattgtgttgtgcgtatggcttggccgaataaagccagtaggggagtttttgaaacttattggtaggcacacccttcccatctacattgggcatgcaacaggactatcgctgatttttggtttcggcttgcgctggaatttcatggagattgataacttctctgacagtttgtggcaccacaccaatacgtggatggtcatcgcgtttgcctgcgcgatgctcggcgggtacctgacctatctgatctcgcgagttccagtgctgggatggactcttgttccccctaaactgccagaaccagataaaactccagctaaagcacaagctgattctcacgttaaagctcagtctgcgaagcctatgaatgcttctacctcttctaagacgtacggtatataactgaagcataacctgtgtga

SEQ ID NO: 1020 - protein, 396 aa, Corynebacterium glutamicum
MDWPDIAKGISILGVVLLHVSLAIPGGQDTMMSHLNALLDPLRMPLFFMVSGFFAVKVLNQSFGELFRGRLWFYLVPYLLWTPVNLYLHRLEGTVFTGRAPGTWEWYSGSMLSATNMYWFLYFLVIFNLFLWATRKLPAWAIVALVASLWLLMPAYSEIEILRKSIIYLPTFLIGAYFRPLISRFAEAATRPKAIVFAAVLYVSGLALGVISNGLRDSENHGASVLWLMNLRDTFAHALGGNLTGFDMDHLPGMIIRIVSLPAGIVLCVWLGRIKPVGEFLKLIGRHTLPIYIGHATGLSLIFGFGLRWNFMEIDNFSDSLWHHTNTWMVIAFACAMLGGYLTYLISRVPVLGWTLVPPKLPEPDKTPAKAQADSHVKAQSAKPMNASTSSKTYGI

SEQ ID NO: 1021 - DNA, 1311 bp, Corynebacterium glutamicum; identical to SEQ ID NO: 1019
  CDS (101)..(1288): FRXA02151

SEQ ID NO: 1022 - protein, 396 aa, Corynebacterium glutamicum; identical to SEQ ID NO: 1020

SEQ ID NO: 1023 - DNA, 969 bp, Corynebacterium glutamicum
  CDS (101)..(946): RXN02169
gttaaaggtcgaaaaatcccacccctagcccttttaaatgagtgttgttattgttaaccactgttactggtgggattaatacttatttttgggagaacttttggacatgcaaataaaccgccgaggcttcttaaaagccaccacaggacttgccactatcggcgctgccagcatgtttatgccaaaggccaacgcccttggagcaatcaagggcaccgtcatcgactacgcagcaggcgtccccagcgcagcatccattaaaaatgcagggcaccttggagctgtccgttacgtgtcacagcgacgccccggcactgaatcctggatgatcggcaagccagtcacactggcagaaacccgagcttttgaacaaaacggcctcaaaaccgcatccgtctatcaatacggaaaggcagagaccgccgattggaagaacggcgccgcaggagcggcaacccacgctccacaggcaattgcgcttcacgtggcagctggtggccctaaaaatcgccccatctacgtggcgatcgacgacaacccaagctggtctgaatacaccaatcagattcgcccctacctccaggcattcaatgttgcgctgtccgctgccggctaccagttaggtgtctacggcaactacaacgtcattaattgggctatcgccgacggccttggagaattcttctggatgcacaactggggatcagaaggaaagatccacccacgcaccaccatccaccagatccgcattgataaggacaccctcgacggagtcggcatcgacatgaacaatgtctatgcagacgactggggtcagtggaccccaggcaacgcggttgacgatgccatccccaccattcctggaaactccaacacgggaacaggtactggaattgatgctgacaccatcaaccaagtaatcaagattcttggcaccctatctagctaaactagccgtgctgactcaca

SEQ ID NO: 1024 - protein, 282 aa, Corynebacterium glutamicum
LDMQINRRGFLKATTGLATIGAASMFMPKANALGAIKGTVIDYAAGVPSAASIKNAGHLGAVRYVSQRRPGTESWMIGKPVTLAETRAFEQNGLKTASVYQYGKAETADWKNGAAGAATHAPQAIALHVAAGGPKNRPIYVAIDDNPSWSEYTNQIRPYLQAFNVALSAAGYQLGVYGNYNVINWAIADGLGEFFWMHNWGSEGKIHPRTTIHQIRIDKDTLDGVGIDMNNVYADDWGQWTPGNAVDDAIPTIPGNSNTGTGTGIDADTINQVIKILGTLSS

SEQ ID NO: 1025 - DNA, 969 bp, Corynebacterium glutamicum; identical to SEQ ID NO: 1023
  CDS (101)..(946): FRXA02169

SEQ ID NO: 1026 - protein, 282 aa, Corynebacterium glutamicum; identical to SEQ ID NO: 1024

SEQ ID NO: 1027 - DNA, 1581 bp, Corynebacterium glutamicum
  CDS (101)..(1558): RXN02180
gtttcagctaaaagaagaatccttgctagtggaatcagctgagttttccacgagttttccagctttctcacaacttgaatagaaattgaggtatccggcaatgacgtcagggaaatcaacgagtactaggggagccctagaccggtatttcaaaatctcggagcgaggatcaagcattggcacggaaatccgtgcaggtgtggtcacattcttcgcgatggcctacatcatcatcctcaaccccttgatccttggcaccacccctgacgtagagggcaacaccctaggcatcgcacaggttgcagcggcaacagcgcttgccgctggtgtcatgaccatcgcgtttggtttgattgcgcgttatccattcggcattgctgctggcctgggaattaacaccatggtcgccgtgacactggtttcaggtgagggcctgacctggccggaagcaatgggacttgtggtccttgacggtgtggtcattgttattttggctgtgtccggcttccgtgttgctgtgttccgtgcgatcccagcatccatgaaggcggccatcagcgtgggtatcggcctgttcatcgccatgatcggcctcgtggatgcaggctttgttcgccgtattccagatgctgccggtactactgtgccagtgactttgggcattgatggttccattgcgtcttggccaacgttcgtgttcgttgtcggtgttcttctctgtggcatccttgttgtccgtcgagttcgcggtggactgtttatcggcattttgggaaccaccattttggcgatcatcgcagaagcaatctttgattccggtgcgtcctttgaaaatggtgaagcaaacgcagaaggctggtcactcgccgttcctggtctcccagactccttcggtggcatcccggatctttccatcgtcggcgcagttgatttgatcggtgcgttcagccgcatcggtgtggtcgccgcgaccttgctgatctttaccctggtccttgcaaacttcttcgacgccatgggcaccatgaccgctcttggtaagcagggcaacttggttgatgatgaaggcaaccttccagacattaagaaggcactggttgtggaaggcgcaggtgccattgtcggtggtgctttctctgcatcctccaacaccgtgttcgctgactcttctgcaggtgttgcagacggcgcacgaaccggccttgccaacgtggtcaccggctccttgttcttggctgccatgttcttgaccccactgtatgaaatcgtccccatcgaagcagcagcaccagtgcttgtagttgttggcgcgatgatgatggggcaggttaccgagattgatttctccaagttctacatcgcattcccagcgttcttgaccattgtgatcatgcctttcacctactccattgcaaacggcattggcgttggattcatcatgtacgccatcatggctgcagcggcaggcaaagcaaagcaagtgcactggctgatgtggctggtcgctggactcttcgtcgtgttcttcgcgattgatcccatcatggaagctgtcggctaatgacaacgcgcacggtaatt

SEQ ID NO: 1028 - protein, 486 aa, Corynebacterium glutamicum
MTSGKSTSTRGALDRYFKISERGSSIGTEIRAGVVTFFAMAYIIILNPLILGTTPDVEGNTLGIAQVAAATALAAGVMTIAFGLIARYPFGIAAGLGINTMVAVTLVSGEGLTWPEAMGLVVLDGVVIVILAVSGFRVAVFRAIPASMKAAISVGIGLFIAMIGLVDAGFVRRIPDAAGTTVPVTLGIDGSIASWPTFVFVVGVLLCGILVVRRVRGGLFIGILGTTILAIIAEAIFDSGASFENGEANAEGWSLAVPGLPDSFGGIPDLSIVGAVDLIGAFSRIGVVAATLLIFTLVLANFFDAMGTMTALGKQGNLVDDEGNLPDIKKALVVEGAGAIVGGAFSASSNTVFADSSAGVADGARTGLANVVTGSLFLAAMFLTPLYEIVPIEAAAPVLVVVGAMMMGQVTEIDFSKFYIAFPAFLTIVIMPFTYSIANGIGVGFIMYAIMAAAAGKAKQVHWLMWLVAGLFVVFFAIDPIMEAVG

SEQ ID NO: 1029 - DNA, 1581 bp, Corynebacterium glutamicum; identical to SEQ ID NO: 1027
  CDS (101)..(1558): FRXA02180

SEQ ID NO: 1030 - protein, 486 aa, Corynebacterium glutamicum; identical to SEQ ID NO: 1028

SEQ ID NO: 1031 - DNA, 702 bp, Corynebacterium glutamicum
  CDS (101)..(679): RXN02185
caactccttggggtgaagccagacatccactggcagagcaactcctccgctctaacccgacagctaacctcgacggcgacaaatgagaggaaaacttttcatgggacgtcactccactaagactagctccgcgttcaccaagctcgcagcttccaccatcgctttcggtgctgctgcaaccatcatggctccttctgcatctgctgcacctgattccgactgggatcgcctcgcacagtgcgagtccggtggtaactgggcaatcaacaccggtaacggctaccacggtggtctgcagttctccgctagcacctgggctgcttacggcggccaggagttcgctacctacgcataccaggcaacccgtgagcagcagatcgctgttgcagagcgcaccttggctggtcagggctggggcgcatggcctgcttgctccgcttcccttggactgaactccgctccaacccagcgtgacctctccgctaccacctccaccccagagccagctgcagctgcaccagctgttgctgagtacaacgctcctgcagccaacatcgcagttggctccaccgacttgaacaccatcaagtccacctacggcgctgtcaccggcaccctcgctcagtacggcatcaccgttccagctgaggttgagtcttactacaacgctttcgtcggctaaatctagctgcactttttaaa

SEQ ID NO: 1032 - protein, 193 aa, Corynebacterium glutamicum
MGRHSTKTSSAFTKLAASTIAFGAAATIMAPSASAAPDSDWDRLAQCESGGNWAINTGNGYHGGLQFSASTWAAYGGQEFATYAYQATREQQIAVAERTLAGQGWGAWPACSASLGLNSAPTQRDLSATTSTPEPAAAAPAVAEYNAPAANIAVGSTDLNTIKSTYGAVTGTLAQYGITVPAEVESYYNAFVG

SEQ ID NO: 1033 - DNA, 702 bp, Corynebacterium glutamicum; identical to SEQ ID NO: 1031
  CDS (101)..(679): FRXA02185

SEQ ID NO: 1034 - protein, 193 aa, Corynebacterium glutamicum; identical to SEQ ID NO: 1032

SEQ ID NO: 1035 - DNA, 321 bp, Corynebacterium glutamicum
  CDS (101)..(298): RXN02186
tccaaccaccccttgagggtggggatgggggagtcttttttcatgatgttgttaagtttaagccttgttgaggtgacttttgttcccagagtttgaaagaatgtatgacatggcaaacgtagagaagaagcacttcgtcgatccggcatggccggagcacaatccagctgacggacacgtcgttactgaactcatctccaaggtcgcaggcgcgtccagcccatggggcgatgacaaggaattcccagtttctgcagaagagaccggatacgttcacccgtacacccggatcaaccgctaagaaacttaaaaaagaggcaa

SEQ ID NO: 1036 - protein, 66 aa, Corynebacterium glutamicum
MYDMANVEKKHFVDPAWPEHNPADGHVVTELISKVAGASSPWGDDKEFPVSAEETGYVHPYTRINR

SEQ ID NO: 1037 - DNA, 342 bp, Corynebacterium glutamicum
  CDS (101)..(319): FRXA02186
agctgatcatcactttgagtatccaaccaccccttgagggtggggatgggggagtcttttttcatgatgttgttaagtttaagccttgttgaggtgacttttgttcccagagtttgaaagaatgtatgacatggcaaacgtagagaagaagcacttcgtcgatccggcatggccggagcacaatccagctgacggacacgtcgttactgaactcatctccaaggtcgcaggcgcgtccagcccatggggcgatgacaaggaattcccagtttctgcagaagagaccggatacgttcacccgtacacccggatcaaccgctaagaaacttaaaaaagaggcaa

SEQ ID NO: 1038 - protein, 73 aa, Corynebacterium glutamicum
LFPEFERMYDMANVEKKHFVDPAWPEHNPADGHVVTELISKVAGASSPWGDDKEFPVSAEETGYVHPYTRINR

SEQ ID NO: 1039 - DNA, 898 bp, Corynebacterium glutamicum
  CDS (101)..(898): RXN02207
gaatcggtgactttgccaacaccaatcacacaagcccttgatgatgtctccctgtgacttggtccaattacattcactggtaatctgaaaccttgtgaatatgcgccgtcgatcccgtgtgtcccgtttgcttcccgccacagctttgctggcctcaactgcacttcttttaagtgcatgtacgcaaggggtaacggactccccggatatgggcaaggcaactcccgctgtctcccccgcagcaagcaacccggatggccaagtaattgagttcggcaacatcactgacatggaagtcactgatggtgacatcctcggtgtacgcaccgaagacgcactcgctattggtacagtctccgacttcgaagcgggtagccaggtggaactggacgtcgataagcaatgcggcgacctgaccgcaaccggcggcactttcgtgctcccctgcgccgatggcgtttatttgattgatgccaaggacccggatctggatgagttgcgtgcaactgacaagccagtcacggtggcagccttgaccagcgatgatcagcttctggtgggcaatggtgaagatgaagaactcaccatctaccgcgagggcgaagagccagaaaccttcaccgtcgcgggtcccaatacccagctcatcgccgttcctgtcattgatcgccacgacgccgttgtgcgcacctggaacgaaaacaccacgattcaagatgtggactaccccaacgaccgtgaaggcgcgacccttcgcgtgggactcggcgttggtcaaatggctggtggcgaagacggcctgctggtggtctctgatgaaatgggtggccaaattgccatctacaacgctgatgatgtcatccgacttcaaaatgaccgcccccaccgacgaggaacc

SEQ ID NO: 1040 - protein, 266 aa, Corynebacterium glutamicum
MRRRSRVSRLLPATALLASTALLLSACTQGVTDSPDMGKATPAVSPAASNPDGQVIEFGNITDMEVTDGDILGVRTEDALAIGTVSDFEAGSQVELDVDKQCGDLTATGGTFVLPCADGVYLIDAKDPDLDELRATDKPVTVAALTSDDQLLVGNGEDEELTIYREGEEPETFTVAGPNTQLIAVPVIDRHDAVVRTWNENTTIQDVDYPNDREGATLRVGLGVGQMAGGEDGLLVVSDEMGGQIAIYNADDVIRLQNDRPHRRGT

SEQ ID NO: 1041 - DNA, 859 bp, Corynebacterium glutamicum
  CDS (101)..(859): FRXA02207
gaatcggtgactttgccaacaccaatcacacaagcccttgatgatgtctccctgtgacttggtccaattacattcactggtaatctgaaaccttgtgaatatgcgccgtcgatcccgtgtgtcccgtttgcttcccgccacagctttgctggcctcaactgcacttcttttaagtgcatgtacgcaaggggtaacggactccccggatatgggcaaggcaactcccgctgtctcccccgcagcaagcaacccggatggccaagtaattgagttcggcaacatcactgacatggaagtcactgatggtgacatcctcggtgtacgcaccgaagacgcactcgctattggtacagtctccgacttcgaagcgggtagccaggtggaactggacgtcgataagcaatgcggcgacctgaccgcaaccggcggcactttcgtgctcccctgcgccgatggcgtttatttgattgatgccaaggacccggatctggatgagttgcgtgcaactgacaagccagtcacggtggcagccttgaccagcgatgatcagcttctggtgggcaatggtgaagatgaagaactcaccatctaccgcgagggcgaagagccagaaaccttcaccgtcgcgggtcccaatacccagctcatcgccgttcctgtcattgatcgccacgacgccgttgtgcgcacctggaacgaaaacaccacgattcaagatgtggactaccccaacgaccgtgaaggcgcgacccttcgcgtgggactcggcgttggtcaaatggctggtggcgaagacggcctgctggtggtctctgatgaaatgggtggccaaattgccatctacaacgctgatgatgtc

SEQ ID NO: 1042 - protein, 253 aa, Corynebacterium glutamicum
MRRRSRVSRLLPATALLASTALLLSACTQGVTDSPDMGKATPAVSPAASNPDGQVIEFGNITDMEVTDGDILGVRTEDALAIGTVSDFEAGSQVELDVDKQCGDLTATGGTFVLPCADGVYLIDAKDPDLDELRATDKPVTVAALTSDDQLLVGNGEDEELTIYREGEEPETFTVAGPNTQLIAVPVIDRHDAVVRTWNENTTIQDVDYPNDREGATLRVGLGVGQMAGGEDGLLVVSDEMGGQIAIYNADDV

SEQ ID NO: 1043 - DNA, 601 bp, Corynebacterium glutamicum
  CDS (101)..(601): RXN02223
cttgcttttgagggccgctacgcgcagctgtatcaacgatggagtgctcaatagttcaaatccaccacaaactctagagatttggggtagaaacgaagacatgagcacctaccaagacgatcgtttcccaggcccagacccctacgcaccgcttggtgaaaagccaagctttaccctcacctccaccgacttggaaaacggtgcaaagctggccgaagcccaactcggtggcaccgatatttccccacagctgtcctggtcagatcttccagaaggcaccaaatccctcgcgatcacctgcctcgacccagatgccccaaccggcgctggtttctggcactgggcagtgtttaacatccccacaactgtcacggagatccccaccggtgctggcgatgaaaccctcggcggcatcgaaggcgtagtttccctcaagggtgattccggcaagcgtggcttctacggagcgcaacctccagctggccacgcaccgcaccgttacctcttcgcagttcatgcacttgatgtggaaaaactcgacatcgcccccgacgctacccccactggtctaggcttcaacctgtatttccacactcttggc

SEQ ID NO: 1044 - protein, 167 aa, Corynebacterium glutamicum
MSTYQDDRFPGPDPYAPLGEKPSFTLTSTDLENGAKLAEAQLGGTDISPQLSWSDLPEGTKSLAITCLDPDAPTGAGFWHWAVFNIPTTVTEIPTGAGDETLGGIEGVVSLKGDSGKRGFYGAQPPAGHAPHRYLFAVHALDVEKLDIAPDATPTGLGFNLYFHTLG

SEQ ID NO: 1045 - DNA, 520 bp, Corynebacterium glutamicum
  CDS (101)..(520): FRXA02223
cttgcttttgagggccgctacgcgcagctgtatcaacgatggagtgctcaatagttcaaatccaccacaaactctagagatttggggtagaaacgaagacatgagcacctaccaagacgatcgtttcccaggcccagacccctacgcaccgcttggtgaaaagccaagctttaccctcacctccaccgacttggaaaacggtgcaaagctggccgaagcccaactcggtggcaccgatatttccccacagctgtcctggtcagatcttccagaaggcaccaaatccctcgcgatcacctgcctcgacccagatgccccaaccggcgctggtttctggcactgggcagtgtttaacatccccacaactgtcacggagatccccaccggtgctggcgatgaaaccctcggcggcatcgaaggcgtagtttccctcaagggtgattccggcaagcgtggcttctacggagcgcaacctccagctggccacgcaccgcaccgttacctcttcgcagttcatgca

SEQ ID NO: 1046 - protein, 140 aa, Corynebacterium glutamicum
MSTYQDDRFPGPDPYAPLGEKPSFTLTSTDLENGAKLAEAQLGGTDISPQLSWSDLPEGTKSLAITCLDPDAPTGAGFWHWAVFNIPTTVTEIPTGAGDETLGGIEGVVSLKGDSGKRGFYGAQPPAGHAPHRYLFAVHA

SEQ ID NO: 1047 - DNA, 1156 bp, Corynebacterium glutamicum
  CDS (101)..(1156): RXN02226
ctgacacctcctatggcacgcggtatgtttaataaacgtaattcgagtttcggcggccgtgtcgcgcggccaggacgaccctagcttttaaggacccaccatgactgagaaccagactcccagctccacctctgcaccgaagccgggacctcgcccgggcccacggccaggaccccgacctggggctcaggttgctgcaaagaaagctgcggttgctacacctgcgccgatcgccaaaacttctaacgatcctgcaaagtttggtcgcgttgaggcagacggatctgcatatgtcaccacctctgctggcgagcgtctgattggttcttggcaggccggcacccctgaggaaggtcttgctcactacggcgcccgttttgatgatctggccaccgaagttgagctcatggaacagcgcctaatctcccaccctgatgatgcgacctccatccgcacgaaggctgaagaactcaaggcaaccctgcccaccatcgctgcgatcggtgaccttgatggcgttgaagctcgcctgtccaagatcatcaacaactccgaggaagccaacgagcgcgccaaggaacaaaaggctaaaaaccgtgagcgcgcagtagctcgcaaggaagagctcgctgttgaggctgaaaccttggcagaaaactcctccgactggaaggttgctggcgaccgcatccgcgccatcctggatgagtggaagtccatccacggcatcgaccgcaagaccgatgatgaactgtggaaacgctactcccgtgcgcgtgactccttcaaccgtcgccgcggcgcacacttcgcagagctggatcgcacccgcgcatctgcacgcaaactcaaggaagaactcgttgagcgcgccaatgctctcaaggaatccactgagtggaacgacaccgcccgcgcattccgcgatctcatgaccgaatggaaagccgccggccgcgcaccacgcgaaatcgacgacaagctgtgggcagcattcaagggcgcccaggactacttctttgataagcgcaacgccgtagccaaggaacgcgaccaggaattcgaagccaacgcaaccgcaaagcagcagctcatcgacgaatacgacgcacagatcaaccccgagcagggcctcgatggagcgcgcagcaagctc

SEQ ID NO: 1048 - protein, 352 aa, Corynebacterium glutamicum
MTENQTPSSTSAPKPGPRPGPRPGPRPGAQVAAKKAAVATPAPIAKTSNDPAKFGRVEADGSAYVTTSAGERLIGSWQAGTPEEGLAHYGARFDDLATEVELMEQRLISHPDDATSIRTKAEELKATLPTIAAIGDLDGVEARLSKIINNSEEANERAKEQKAKNRERAVARKEELAVEAETLAENSSDWKVAGDRIRAILDEWKSIHGIDRKTDDELWKRYSRARDSFNRRRGAHFAELDRTRASARKLKEELVERANALKESTEWNDTARAFRDLMTEWKAAGRAPREIDDKLWAAFKGAQDYFFDKRNAVAKERDQEFEANATAKQQLIDEYDAQINPEQGLDGARSKL

SEQ ID NO: 1049 - DNA, 1156 bp, Corynebacterium glutamicum; identical to SEQ ID NO: 1047
  CDS (101)..(1156): FRXA02226

SEQ ID NO: 1050 - protein, 352 aa, Corynebacterium glutamicum; identical to SEQ ID NO: 1048

SEQ ID NO: 1051 - DNA, 408 bp, Corynebacterium glutamicum
  CDS (101)..(385): RXN02238
ggcgcttagccaaaacatagagcggtagggtatgcttatccgattgagcaacctttcccgctcttaacactactgtccatatacttttgaaaaggtgtcagtgaccaacgtgagcaacgagaccaacgccaccaaggccgtcttcgatccgccagtgggcattaccgctcctccgatcgatgaactgctggataaggtcacttccaagtacgccctcgtgatcttcgcagccaagcgtgcgcgccagatcaacagcttctaccatcaggcagatgagggagtattcgagttcatcggaccattggttactccgcagccaggcgaaaagccactttctattgctctgcgtgagatcaatgcaggtctgttggaccacgaggaaggttaaaagaccttataacttcacac

SEQ ID NO: 1052 - protein, 95 aa, Corynebacterium glutamicum
VTNVSNETNATKAVFDPPVGITAPPIDELLDKVTSKYALVIFAAKRARQINSFYHQADEGVFEFIGPLVTPQPGEKPLSIALREINAGLLDHEEG

SEQ ID NO: 1053 - DNA, 408 bp, Corynebacterium glutamicum; identical to SEQ ID NO: 1051
  CDS (101)..(385): FRXA02238

SEQ ID NO: 1054 - protein, 95 aa, Corynebacterium glutamicum; identical to SEQ ID NO: 1052

SEQ ID NO: 1055 - DNA, 800 bp, Corynebacterium glutamicum
  CDS (1)..(777): RXN02254
atcgccgttgccgaagaaggcggattgtgggaaaacctcctgcagcaccgcttcggtggacatggtgcgctagctggtcacgccttgggaaacctcgtgatcgcggcgttgaccgacattttgggcacctcccagcatgcgcttgatcaaatcgctcaactcgctggagccaaaggacgcatcatcccggtatgtgctgaacctttggatcttgaagcggaagtatcaggtctagactctgatgctcgagtcatgcgtcaagttcgtggtcaagtggcggtagctgcaacccccgggcaggtgcgacgcgttcgaatcattccggacaatccagaaccgaaccccgctgccatcgaggccattctcgatgcagatttggtcacccttggcccaggttcctggttctcctctgtgattccacacattttggtcccagggatcgttgatgccttggcgcagacaaaagcaaccaaaaccgtggtgttaaacctgacgtccgagccaggggagaccgcgggattctctgcagaacgacacatccatgtgctccgccagcatgctcgaaaccttcaggttgaccaagtcattgtcgatgccaagacactgtcctcacaaaccgaacgcaatcatgtagaacgagctgctcgcacccttggtgcagaagtctccttccatgatgtccaggctgaagatggccgtggtcgattcaccagtattcacgatccagcaaagctgtgtgcagcgttgctggcaagttttgctggagcacgaaagcgttaaggagtaggcgtgtcactgac

SEQ ID NO: 1056 - protein, 259 aa, Corynebacterium glutamicum
IAVAEEGGLWENLLQHRFGGHGALAGHALGNLVIAALTDILGTSQHALDQIAQLAGAKGRIIPVCAEPLDLEAEVSGLDSDARVMRQVRGQVAVAATPGQVRRVRIIPDNPEPNPAAIEAILDADLVTLGPGSWFSSVIPHILVPGIVDALAQTKATKTVVLNLTSEPGETAGFSAERHIHVLRQHARNLQVDQVIVDAKTLSSQTERNHVERAARTLGAEVSFHDVQAEDGRGRFTSIHDPAKLCAALLASFAGARKR

SEQ ID NO: 1057 - DNA, 804 bp, Corynebacterium glutamicum
  CDS (101)..(781): FRXA02254
ttgatcgccgatgccgaagaaggcggattgtgggaaaacctcctgcagcaccgcttcaggtggacatggtgcgctagctggtcacgccttgggaaacctcgtgatcgcggcgttgaccgacattttgggcacctcccagcatgcgcttgatcaaatcgctcaactcgctggagccaaaggacgcatcatcccggtatgtgctgaacctttggatcttgaagcggaagtatcaggtctagactctgatgctcgagtcatgcgtcaagttcgtggtcaagtggcggtagctgcaacccccgggcaggtgcgacgcgttcgaatcattccggacaatccagaaccgaaccccgctgccatcgaggccattctcgatgcagatttggtcacccttggcccaggttcctggttctcctctgtgattccacacattttggtcccagggatcgttgatgccttggcgcagacaaaagcaaccaaaaccgtggtgttaaacctgacgtccgagccaggggagaccgcgggattctctgcagaacgacacatccatgtgctccgccagcatgctcgaaaccttcaggttgaccaagtcattgtcgatgccaagacactgtcctcacaaaccgaacgcaatcatgtagaacgagctgctcgcacccttggtgcagaagtctccttccatgatgtccaggctgaagatggccgtggtcgattcaccagtattcacgatccagcaaagctgtgtgcagcgttgctggcaagttttgctggagcacgaaagcgttaaggagtaggcgtgtcactgac

SEQ ID NO: 1058 - protein, 227 aa, Corynebacterium glutamicum
VIAALTDILGTSQHALDQIAQLAGAKGRIIPVCAEPLDLEAEVSGLDSDARVMRQVRGQVAVAATPGQVRRVRIIPDNPEPNPAAIEAILDADLVTLGPGSWFSSVIPHILVPGIVDALAQTKATKTVVLNLTSEPGETAGFSAERHIHVLRQHARNLQVDQVIVDAKTLSSQTERNHVERAARTLGAEVSFHDVQAEDGRGRFTSIHDPAKLCAALLASFAGARKR

SEQ ID NO: 1059 - DNA, 681 bp, Corynebacterium glutamicum
  CDS (101)..(658): RXN02271
cactcccctatcctaagccacatctcggtttattaaactgttagtgaattctcacccgcaacactggtgtatttcagttacatccgtatggttattggttatgagctttcttaactctgcaaaaaccaagaccgtagccctcaccgcaaccttcgttggtgcagcaacccttgcaactcctgcaatcgcatccgctgacatcgtcgacaacgccctcgcagccctcccatccggtgagatcagctgctcccaggctgaaaagtactggaccaccgaagctgattacaacagcaaggttgcacaggccaacgccttggcaatgtttgactcccgcggcccacagatccaggcagctctcgcacgcgttgacgaagcagcaaaccgctgcggactcaagggcggcaccgtagctgcgcaggctgaggcaactgaggctgcgcctgccgctccagcacctgcaccgcaggataacaccggcacttctcagactgcccctgccccagcagcaccagcagcaccagcagctacccctgtggttaaccttgcacctgcaggatcaccaactttcaccattgaagttccaggagttggcggggttcagctgccagatctataccaaatcgtccaacagttcttggcacagttcggaatcaagatctaaatctattcacatcccttaac

SEQ ID NO: 1060 - protein, 186 aa, Corynebacterium glutamicum
MSFLNSAKTKTVALTATFVGAATLATPAIASADIVDNALAALPSGEISCSQAEKYWTTEADYNSKVAQANALAMFDSRGPQIQAALARVDEAANRCGLKGGTVAAQAEATEAAPAAPAPAPQDNTGTSQTAPAPAAPAAPAATPVVNLAPAGSPTFTIEVPGVGGVQLPDLYQIVQQFLAQFGIKI

SEQ ID NO: 1061 - DNA, 681 bp, Corynebacterium glutamicum; identical to SEQ ID NO: 1059
  CDS (101)..(658): FRXA02271

SEQ ID NO: 1062 - protein, 186 aa, Corynebacterium glutamicum; identical to SEQ ID NO: 1060

SEQ ID NO: 1063 - DNA, 1581 bp, Corynebacterium glutamicum
  CDS (101)..(1558): RXN02279
ggtaagagggcattttccgatgcgcagcgattcttgctcaacgccgacgagctcgcggagctttctgattatgagcgtctggcttatgccatcaccttgcttgatcagcctggaaaagaagcagaaggacgcgaactttttcctttcggagcttcgccgccagggctaccgcgctgtcgatttcttggaatcccagactgttgaccagctgaataaccccgatgtccagacttacctcaccgaagcggaactgattcgcgatgacttgaggtcttgggcagtcatcaatcaaatggcattggacaacatcgatcttgttccatacggcgaggaaaacgacgagccacttgcaatcgcccgcaagatcatcgaggaaaccgcttcccatcctgagctgagattcgaaaacctcgaggcccagttctccgagttcaccatcttgcttgctcaaagcccggagaacctcgacgtagcccgctaccaggagcttcgtacacagggaaactttgttcaagaactcgccttggacagcattttcggccaacatgccgttgttcaagacaccggaaacggcgaagccatcctagatgaaactatcgggtacatgatcggcgccggcatgcgtgaaaccactgcccgcaccgccagccagttcgcgcagctttactcatttgtgggcaggcaggaacgctccattgaaatggcacgactcgctttcgaggaacttcaagcggcaggacttccccaccgtgaggaagaactgcgattgggcatgcaactcgcccaggttgaaccaattgaagcccgcgaaatcctggaaaagctgctgctgcctaaattcgagcagaatctgacacttgatgaacttgaaactgaagcactccttcctttgggtgctaccgttgctatccacgacccccaggctgccgcagcaattttgcgccacgctcgcgaaaacgccgcagggttcggcaacttcgaactcgcagtccaagcgatgaccatgatcacggatgtcctctacacccaaaacatgcacgagcaactgctggaggagctcaaccactctctcccctatgctcaaatgcttgatgatcaacaccaagctgaactgaaactgctggacagcatcgccatcgtccaggcagacctcggttccaccgaagcgctggaaaccctgggcaccgcaatgggactcgcagaaaccacagctcagaagctatacgtgcaggaatccctcaaccgcgcatacttcacttttgcccgccctgaagattgcatcagcggagcagccgacgcttctgccctggccatgcaaaacgatgacccttccaatgcagctgcccagttggagcagtgtgcacagtacttgttccaattgggccacgaaactgacggcgcaagcctgctggaatctgcattcagggttgaaggcatccccactgagcaggcactgtactacgcaaatgcactgtcttccatctatgaagatttcggcgattccgcgaagtcgcagtactgggagcagcaggcgcaggaaaagcagcagcttctggagtaacggccgtttaaagagtcgaa

SEQ ID NO: 1064 - protein, 486 aa, Corynebacterium glutamicum
LISLEKKQKDANFFLSELRRQGYRAVDFLESQTVDQLNNPDVQTYLTEAELIRDDLRSWAVINQMALDNIDLVPYGEENDEPLAIARKIIEETASHPELRFENLEAQFSEFTILLAQSPENLDVARYQELRTQGNFVQELALDSIFGQHAVVQDTGNGEAILDETIGYMIGAGMRETTARTASQFAQLYSFVGRQERSIEMARLAFEELQAAGLPHREEELRLGMQLAQVEPIEAREILEKLLLPKFEQNLTLDELETEALLPLGATVAIHDPQAAAAILRHARENAAGFGNFELAVQAMTMITDVLYTQNMHEQLLEELNHSLPYAQMLDDQHQAELKLLDSIAIVQADLGSTEALETLGTAMGLAETTAQKLYVQESLNRAYFTFARPEDCISGAADASALAMQNDDPSNAAAQLEQCAQYLFQLGHETDGASLLESAFRVEGIPTEQALYYANALSSIYEDFGDSAKSQYWEQQAQEKQQLLE

SEQ ID NO: 1065 - DNA, 1427 bp, Corynebacterium glutamicum
  CDS (1)..(1404): FRXA02279
  modified_base (1): a, t, c, or g
  modified_base (3): a, t, c, or g
ncngccagggctaccgcgcttgtcgatttcttggaatcccagactgttgaccagctgaataaccccgatgtccagacttacctcaccgaagcggaactgattcgcgatgacttgaggtcttgggcagtcatcaaatcaaatggcattggacaacatcgatcttgttccatacggcgaggaaacgacgagccacttgcaatcgcccgcaagatcatcgaggaaaccgcttcccatcctgagctgagattcgaaaacctcgaggcccagttctccgagttcaccatcttgcttgctcaaagcccggagaacctcgacgtagcccgctaccaggagcttcgtacacagggaaactttgttcaagaactcgccttggacagcattttcggccaacatgccgttgttcaagacaccggaaacggcgaagccatcctagatgaaactatcgggtacatgatcggcgccggcatgcgtgaaaccactgcccgcaccgccagccagttcgcgcagctttactcatttgtgggcaggcaggaacgctccattgaaatggcacgactcgctttcgaggaacttcaagcggcaggacttccccaccgtgaggaagaactgcgattgggcatgcaactcgcccaggttgaaccaattgaagcccgcgaaatcctggaaaagctgctgctgcctaaattcgagcagaatctgacacttgatgaacttgaaactgaagcactccttcctttgggtgctaccgttgctatccacgacccccaggctgccgcagcaattttgcgccacgctcgcgaaaacgccgcagggttcggcaacttcgaactcgcagtccaagcgatgaccatgatcacggatgtcctctacacccaaaacatgcacgagcaactgctggaggagctcaaccactctctcccctatgctcaaatgcttgatgatcaacaccaagctgaactgaaactgctggacagcatcgccatcgtccaggcagacctcggttccaccgaagcgctggaaaccctgggcaccgcaatgggactcgcagaaaccacagctcagaagctatacgtgcaggaatccctcaaccgcgcatacttcacttttgcccgccctgaagattgcatcagcggagcagccgacgcttctgccctggccatgcaaaacgatgacccttccaatgcagctgcccagttggagcagtgtgcacagtacttgttccaattgggccacgaaactgacggcgcaagcctgctggaatctgcattcagggttgaaggcatccccactgagcaggcactgtactacgcaaatgcactgtcttccatctatgaagatttcggcgattccgcgaagtcgcagtactgggagcagcaggcgcaggaaaagcagcagcttctggagtaacggccgtttaaagagtcgaa

SEQ ID NO: 1066 - protein, 468 aa, Corynebacterium glutamicum
  MOD_RES (1): Ala, Pro, Ser, or Thr
XARATALVDFLESQTVDQLNNPDVQTYLTEAELIRDDLRSWAVIKSNGIGQHRSCSIRRGNDEPLAIARKIIEETASHPELRFENLEAQFSEFTILLAQSPENLDVARYQELRTQGNFVQELALDSIFGQHAVVQDTGNGEAILDETIGYMIGAGMRETTARTASQFAQLYSFVGRQERSIEMARLAFEELQAAGLPHREEELRLGMQLAQVEPIEAREILEKLLLPKFEQNLTLDELETEALLPLGATVAIHDPQAAAAILRHARENAAGFGNFELAVQAMTMITDVLYTQNMHEQLLEELNHSLPYAQMLDDQHQAELKLLDSIAIVQADLGSTEALETLGTAMGLAETTAQKLYVQESLNRAYFTFARPEDCISGAADASALAMQNDDPSNAAAQLEQCAQYLFQLGHETDGASLLESAFRVEGIPTEQALYYANALSSIYEDFGDSAKSQYWEQQAQEKQQLLE

SEQ ID NO: 1067 - DNA, 612 bp, Corynebacterium glutamicum
  CDS (101)..(589): RXN02296
gcatcatttgtgttgtttaaagtatatggctgttgaagtgccattttcgcggattagcatgggaatcaccagtatttctggacggttaaggatgattcatatgcgtaatcaaacaatcgctgcggtcgcagctttggtcctgctcaccgccgccacgcccgcgatcgctgccaccccggcgacagctggaaacggactctattccattgacatgggcgacgagcaaaagcttacctgcgtgcttttcgatgagccctccaccgaagcgcacgtcgtcgccagctgtgctgcgactttcccggtgacctggaagcttctcgacggcgctcacgaacaagccgcgaaacttgaaatcacccaggctcaagacggtgaactctcggtgacagccagcaagcagccgttgatcaccacgatgattgcgcccaccagcatcactaagcccatcactgtcaataggcttgtggttgttcctggtgagaatgaggttcgcttttatgctaccgatcctgatgttttaccagtgctgatcacgcctgactcctatgaagtgttgaccgattccgctgctaaagtgaaagcgacattatgaaataaacgtggatcaaggag

SEQ ID NO: 1068 - protein, 163 aa, Corynebacterium glutamicum
MRNQTIAAVAALVLLTAATPAIAATPATAGNGLYSIDMGDEQKLTCVLFDEPSTEAHVVASCAATFPVTWKLLDGAHEQAAKLEITQAQDGELSVTASKQPLITTMIAPTSITKPITVNRLVVVPGENEVRFYATDPDVLPVLITPDSYEVLTDSAAKVKATL

SEQ ID NO: 1069 - DNA, 612 bp, Corynebacterium glutamicum; identical to SEQ ID NO: 1067
  CDS (101)..(589): FRXA02296

SEQ ID NO: 1070 - protein, 163 aa, Corynebacterium glutamicum; identical to SEQ ID NO: 1068

SEQ ID NO: 1071 - DNA, 456 bp, Corynebacterium glutamicum
  CDS (101)..(433): RXN02300
gggtcattccggtgaacacggatttcgcgccggtgaatctgacggtcagccaattgcgggcaatgctgtccaaagcggagcgtaaagataaggatcagaaatgaaaacttatgcagtactaattgcggtggcagggttggcacttgctgggtgtagctcgtcggctcctggaatctggcgtgccactgaacccgcagatgcctaccttgaaatagccgatgacggcacgctgtccggaaccgacggctgcaacagactttttggtggctgggaaaaagacggctctaccatcactttcggcgccatcggtatgacagaaatgtactgcgaaggcgtcaacgattggctgtcccagatgcacaccgccaccgtcaccgatgccaccatgaccattttcaacgaggccggcagcaatattggcgagctaaaacgctaaatgcttctcgacgtcaaaag

SEQ ID NO: 1072 - protein, 111 aa, Corynebacterium glutamicum
MKTYAVLIAVAGLALAGCSSSAPGIWRATEPADAYLEIADDGTLSGTDGCNRLFGGWEKDGSTITFGAIGMTEMYCEGVNDWLSQMHTATVTDATMTIFNEAGSNIGELKR

SEQ ID NO: 1073 - DNA, 456 bp, Corynebacterium glutamicum; identical to SEQ ID NO: 1071
  CDS (101)..(433): FRXA02300

SEQ ID NO: 1074 - protein, 111 aa, Corynebacterium glutamicum; identical to SEQ ID NO: 1072

SEQ ID NO: 1075 - DNA, 840 bp, Corynebacterium glutamicum
  CDS (101)..(817): RXN02301
gcttcgcatatgtctggatcttattggatgtatgagtcagagatcagggagatcgcgcactaaccgaacctggccagtgcaacaggattatgtttaaagcatggatcttgcactggctcaggttgattccaccgtttcggggctttatgacgccctcgatctcatcggcgtgctgctgaacggaataatcggtggaacgatcgccaggcaacgaggctatgacatcattggctttctgttcctggcgttattttctgcgctgggtggcggaatgatccgtgacatgctgattcagcaggggactgtcgcggcgatcgataatcagatctaccttgcgctcgcgttttctggcgcgctgattgccatggcggtgaactttaaaggcagggtgtgggagctgtttaaagttcacggcgatgccattgtgttgggcgtctgggcggtgacgggttccgtgaaggcgatgaatgcgggggtggctccgctgccgagtattttcatgggcgtgctcaccgcggtgggtggtggcatggtgcgtgatgtggctactggccagacgccgacgatttttggtggcggaactctttacgctgtgcctgcgacgctttctgccacgtcaatggttatttttcatagctttgaccaggtaattctgggtatgattatttcaccgttcttgggtatcgcgttggcggttactgcgtattggtgcggttgggtcattccggtgaacacggatttcgcgccggtgaatctgacggtcagccaattgcgggcaatgctgtccaaagcggagcgtaaagataaggatcagaaatgaaaacttatgcagtactaatt

SEQ ID NO: 1076 - protein, 239 aa, Corynebacterium glutamicum
MDLALAQVDSTVSGLYDALDLIGVLLNGIIGGTIARQRGYDIIGFLFLALFSALGGGMIRDMLIQQGTVAAIDNQIYLALAFSGALIAMAVNFKGRVWELFKVHGDAIVLGVWAVTGSVKAMNAGVAPLPSIFMGVLTAVGGGMVRDVATGQTPTIFGGGTLYAVPATLSATSMVIFHSFDQVILGMIISPFLGIALAVTAYWCGWVIPVNTDFAPVNLTVSQLRAMLSKAERKDKDQK

SEQ ID NO: 1077 - DNA, 840 bp, Corynebacterium glutamicum; identical to SEQ ID NO: 1075
  CDS (101)..(817): FRXA02301

SEQ ID NO: 1078 - protein, 239 aa, Corynebacterium glutamicum; identical to SEQ ID NO: 1076

SEQ ID NO: 1079 - DNA, 1002 bp, Corynebacterium glutamicum
  CDS (101)..(979): RXN02302
ggccaggttcggttagtgcgcgatctccctgatctctgactcatacatccaataagatccagacatatgcgaagctaatgaaggaaacgaggagctgatagtggcaacaaatcgtacatcttccgctggtgtcatcacgtctgttctcgcatccgctttgttcggagcgatctttttcatctctggggcgattgaggcaaaggcggaaacacttgttgcttggcgtgtccttctaacagcggcatgctatttgcttgcccttctgcaccctgctggtcggaaggtgtttaaggaattttgggacacactaaggtcccaacctcgtcaaattctgtactttatcttcctcgttgtactcatcacgcttcagctgtggctgttttcttggtcgcctaagagtcatgctttagatgcctcacttggttacctgttactgcccattttcctagtaattgtggggcggtttttcttcgctgattacatcaccaggctgcagtggattgcggtgggaatcgcgctgatcgcagtaaccttgaaatttgtcattagtgcgcaattatcgtgggtaacttttgccatcgctgcgggttatgcactgtattttgcgcttcgtaaatactcggggctgaacaacgcttttgcttacggcgcagaagttttagcgttaagtcccctggcatttttcatgctcgccactgtcgaggatccgctgtctaacgccatgttgtcaatggttattctggcgggcctcgctggcgcattagctatggcgttgtatctagccgcctcaactctgcttagtatgccgatgtttggcctgctcagttatggtgaaccaatcttgctgtttgttgcagcactattacttggtgaaacgttgaatctcagcgacgccattgtctactcactactggcgtgcgccctggcgttactgggatttgatgggatacgaaggtctcgaaaaaacctcgagaccgattaacttctgctcaacttcccacc

SEQ ID NO: 1080 - protein, 293 aa, Corynebacterium glutamicum
VATNRTSSAGVITSVLASALFGAIFFISGAIEAKAETLVAWRVLLTAACYLLALLHPAGRKVFKEFWDTLRSQPRQILYFIFLVVLITLQLWLFSWSPKSHALDASLGYLLLPIFLVIVGRFFFADYITRLQWIAVGIALIAVTLKFVISAQLSWVTFAIAAGYALYFALRKYSGLNNAFAYGAEVLALSPLAFFMLATVEDPLSNAMLSMVILAGLAGALAMALYLAASTLLSMPMFGLLSYGEPILLFVAALLLGETLNLSDAIVYSLLACALALLGFDGIRRSRKNLETD

SEQ ID NO: 1081 - DNA, 865 bp, Corynebacterium glutamicum
  CDS (101)..(865): FRXA02302
ggccaggttcggttagtgcgcgatctccctgatctctgactcatacatccaataagatccagacatatgcgaagctaatgaaggaaacgaggagctgatagtggcaacaaatcgtacatcttccgctggtgtcatcacgtctgttctcgcatccgctttgttcggagcgatctttttcatctctggggcgattgaggcaaaggcggaaacacttgttgcttggcgtgtccttctaacagcggcatgctatttgcttgcccttctgcaccctgctggtcggaaggtgtttaaggaattttgggacacactaaggtcccaacctcgtcaaattctgtactttatcttcctcgttgtactcatcacgcttcagctgtggctgttttcttggtcgcctaagagtcatgctttagatgcctcacttggttacctgttactgcccattttcctagtaattgtggggcggtttttcttcgctgattacatcaccaggctgcagtggattgcggtgggaatcgcgctgatcgcagtaaccttgaaatttgtcattagtgcgcaattatcgtgggtaacttttgccatcgctgcgggttatgcactgtattttgcgcttcgtaaatactcggggctgaacaacgcttttgcttacggcgcagaagttttagcgttaagtcccctggcatttttcatgctcgccactgtcgaggatccgctgtctaacgccatgttgtcaatggttattctggcgggcctcgctggcgcattagctatggcgttgtatctagccgcctcaactctgcttagtatgccgatgtttggcctgctcagttatggtgaaccaatcttgctgtttgttgcagcactatta

SEQ ID NO: 1082 - protein, 255 aa, Corynebacterium glutamicum
VATNRTSSAGVITSVLASALFGAIFFISGAIEAKAETLVAWRVLLTAACYLLALLHPAGRKVFKEFWDTLRSQPRQILYFIFLVVLITLQLWLFSWSPKSHALDASLGYLLLPIFLVIVGRFFFADYITRLQWIAVGIALIAVTLKFVISAQLSWVTFAIAAGYALYFALRKYSGLNNAFAYGAEVLALSPLAFFMLATVEDPLSNAMLSMVILAGLAGALAMALYLAASTLLSMPMFGLLSYGEPILLFVAALL

SEQ ID NO: 1083 - DNA, 1029 bp, Corynebacterium glutamicum
  CDS (101)..(1006): RXN02303
gcccgggccgaaatcattccaatctcacccccacccaaaacactgttgatattttcactttccaaccagcgacgtgagcgcacgcactaaggttgtgcccatggctgaaaacaacaccccacaagaaactgaacaagatcaggaagcacgcttccgtgaggagttcgaggttggcggtaaggatcgtcagctttctgaagaagaacagctggagcagctcggatcgtatattgatgcgcactaccctgttccagatttcacgcccccttgggcaggtggcgccggcgatcctgatccagcagaccgctatattgcacatcttcccgatcgcaccacgcatactgcgatgatcatgttgggttctggccttgatcattccatgccgggtgtcgcatttatcggtggtgtgagcgtcgatgacgtcccggaggtcggaggcgcgattttccacccgtcgaatccgacgggccgctgggctgtatcgttccacagcggtggttggtggcgcggttccggtgatgcgttggagttccagtggcgtccagaggtcgcggcagctgcggaattgtccggcacaaccatccttgacctggactatccgctggccccaggccataacctccacgatatgaatgaggttgtgggcaaggcggtcggttacgcccgccaccataatccggtgtcgatcacgggttggggttattcctcgggcgcggcgttagccgcgattaatgcatcgcttttcgacgccctggtcctcacctttccggacctgggtagcgtcgagaagctccctgccgaaattcgtggagacgctgtagtgcccgcggcggctgcgtggccgacgacctttgtgcagatcgcggcgcaggatgagatcgcggagcggccaggagagcttggcgacgcgaccgtgaaggaatacgtttcccgccaccgtatttccacaccgaaggtcgcgcgcgaaaaaatcaccgacgtggcggagttccttaaaactgtttgctaatgtgccagcaggttgtaaat

SEQ ID NO: 1084 - protein, 302 aa, Corynebacterium glutamicum
MAENNTPQETEQDQEARFREEFEVGGKDRQLSEEEQLEQLGSYIDAHYPVPDFTPPWAGGAGDPDPADRYIAHLPDRTTHTAMIMLGSGLDHSMPGVAFIGGVSVDDVPEVGGAIFHPSNPTGRWAVSFHSGGWWRGSGDALEFQWRPEVAAAAELSGTTILDLDYPLAPGHNLHDMNEVVGKAVGYARHHNPVSITGWGYSSGAALAAINASLFDALVLTFPDLGSVEKLPAEIRGDAVVPAAAAWPTTFVQIAAQDEIAERPGELGDATVKEYVSRHRISTPKVAREKITDVAEFLKTVC

SEQ ID NO: 1085 - DNA, 743 bp, Corynebacterium glutamicum
  CDS (1)..(720): FRXA02303
gatcctgatccagcagaccgctatattgcacatcttcccgatcgcaccacgcatactgcgatgatcatgttgggttctggccttgatcattccatgccgggtgtcgcatttatcggtggtgtgagcgtcgatgacgtcccggaggtcggaggcgcgattttccacccgtcgaatccgacgggccgctgggctgtatcgttccacagcggtggttggtggcgcggttccggtgatgcgttggagttccagtggcgtccagaggtcgcggcagctgcggaattgtccggcacaaccatccttgacctggactatccgctggccccaggccataacctccacgatatgaatgaggttgtgggcaaggcggtcggttacgcccgccaccataatccggtgtcgatcacgggttggggttattcctcgggcgcggcgttagccgcgattaatgcatcgcttttcgacgccctggtcctcacctttccggacctgggtagcgtcgagaagctccctgccgaaattcgtggagacgctgtagtgcccgcggcggctgcgtggccgacgacctttgtgcagatcgcggcgcaggatgagatcgcggagcggccaggagagcttggcgacgcgaccgtgaaggaatacgtttcccgccaccgtatttccacaccgaaggtcgcgcgcgaaaaaatcaccgacgtggcggagttccttaaaactgtttgctaatgtgccagcaggttgtaaat

SEQ ID NO: 1086 - protein, 240 aa, Corynebacterium glutamicum
DPDPADRYIAHLPDRTTHTAMIMLGSGLDHSMPGVAFIGGVSVDDVPEVGGAIFHPSNPTGRWAVSFHSGGWWRGSGDALEFQWRPEVAAAAELSGTTILDLDYPLAPGHNLHDMNEVVGKAVGYARHHNPVSITGWGYSSGAALAAINASLFDALVLTFPDLGSVEKLPAEIRGDAVVPAAAAWPTTFVQIAAQDEIAERPGELGDATVKEYVSRHRISTPKVAREKITDVAEFLKTVC

SEQ ID NO: 1087 - DNA, 744 bp, Corynebacterium glutamicum
  CDS (101)..(721): RXN02307
ttttgcattaaccccaggtaggggcattgtcgcaaagcccaactacagcaaggtgcgtacgctggtggccaactgaatacgtttgaggagaaggttttctatgagtggcaccgccatcatgtacgacacgacagttgttccatcgaagaaagaaatcgcgcaggcttggactggttatgtggatcttcagggaagctaccgcctggtagatacggtggatggggaagttggcgttgaggtgctgatttccaaggatcgggaggggcgtttactccagattccgtttagttatcgttcggcagagattaacccagagcagacactttccacattggagcatggtgtgttgggcaagcgttgggtgactaatgcgttgggtgacccggtggcagtgcgggagtttattcgcactattttgacgggcgatgatggtgcagctcgtagcgatggcgtgaagggctatctggatattaaaggttccggcgatgctgagtcggtggatttacaggatgtaaagcttactgaggttacaaggcagcgtgcgattggttcggtaaccatcaacggtgagcgaaagcaattctcgctgcggttgcctcagttgctgaagaatttcagggagacagccgcgggccatacagctacgactcttcgtattgtggcgactcatccggaaaaggacgatgttgagctgctggtcgctgagttcaactggatggaataatccgagacagctcctgaaag

SEQ ID NO: 1088 - protein, 207 aa, Corynebacterium glutamicum
MSGTAIMYDTTVVPSKKEIAQAWTGYVDLQGSYRLVDTVDGEVGVEVLISKDREGRLLQIPFSYRSAEINPEQTLSTLEHGVLGKRWVTNALGDPVAVREFIRTILTGDDGAARSDGVKGYLDIKGSGDAESVDLQDVKLTEVTRQRAIGSVTINGERKQFSLRLPQLLKNFRETAAGHTATTLRIVATHPEKDDVELLVAEFNWME

SEQ ID NO: 1089 - DNA, 490 bp, Corynebacterium glutamicum
  CDS (101)..(490): FRXA02307
ttttgcattaaccccaggtaggggcattgtcgcaaagcccaactacagcaaggtgcgtacgctggtggccaactgaatacgtttgaggagaaggttttctatgagtggcaccgccatcatgtacgacacgacagttgttccatcgaagaaagaaatcgcgcaggcttggactggttatgtggatcttcagggaagctaccgcctggtagatacggtggatggggaagttggcgttgaggtgctgatttccaaggatcgggaggggcgtttactccagattccgtttagttatcgttcggcagagattaacccagagcagacactttccacattggagcatggtgtgttgggcaagcgttgggtgactaatgcgttgggtgacccggtggcagtgcgggagtttattcgcactattttgacgggcgatgatggtgcagctcgtagcgatggcgtgaagggctatctggatattaaaggttccggcgatgct

SEQ ID NO: 1090 - protein, 130 aa, Corynebacterium glutamicum
MSGTAIMYDTTVVPSKKEIAQAWTGYVDLQGSYRLVDTVDGEVGVEVLISKDREGRLLQIPFSYRSAEINPEQTLSTLEHGVLGKRWVTNALGDPVAVREFIRTILTGDDGAARSDGVKGYLDIKGSGDA

SEQ ID NO: 1091 - DNA, 564 bp, Corynebacterium glutamicum
  CDS (101)..(541): RXN02314
tgataccaccgaagtatccggattcaccattattgaagcttcgaccgtccgagatacccgccgtgcacaacagcaagctctcatggacacggtgcactaaatggagtggtaccaagtgcgccgacgggcccgacaactgctcattgtcctttttatagcagcgatgctcggagcagcctccatggtgatcgggccattccttaacgaccgcactatcgaaggcaactccgggcgcgccttggcacaagtaaccaacgtcggcagctaccgcacaacggtggatttccaagatgaaaacggcatctatcactcaccagccaccggcctgttgttccccacgggactgggcgaggggcaacgcgtgtgggtgaactacgccaaatcagatccagacctggtcaaagtagaaggccgcaagtggacactgtccatcatcccagcgcttagtgtcgcagctgtcgccaccgctacctggtcagtactatggctgggagtgggcagattcggaagacgatccgacgacgccaacgaaaccacagtgtaaagctctatgccgggagcatt

SEQ ID NO: 1092 - protein, 147 aa, Corynebacterium glutamicum
MEWYQVRRRARQLLIVLFIAAMLGAASMVIGPFLNDRTIEGNSGRALAQVTNVGSYRTTVDFQDENGIYHSPATGLLFPTGLGEGQRVWVNYAKSDPDLVKVEGRKWTLSIIPALSVAAVATATWSVLWLGVGRFGRRSDDANETTV

SEQ ID NO: 1093 - DNA, 564 bp, Corynebacterium glutamicum; identical to SEQ ID NO: 1091
  CDS (101)..(541): FRXA02314

SEQ ID NO: 1094 - protein, 147 aa, Corynebacterium glutamicum; identical to SEQ ID NO: 1092

SEQ ID NO: 1095 - DNA, 1446 bp, Corynebacterium glutamicum
  CDS (101)..(1423): RXN02337
cacaaggtaaaatttgtgtaattgtgtcgtgtggatttgaaggtttttgtaaatctagttaaatcatgaggtcataagcttttcgggaggttgtcaaaggatgtcgaagctttacgcgggggcaaggatcaatgcactgcgccgaacccatcagctcacccaatcagcattggccgacaagcttgatctctccaccagctatctcaaccagttggaaaatgacggacggccactcactgccacggtgcttctgcagctgatgaaagtgttcgatgttgaggccagttacttctcccctgaccggggtacggccactgctacccgactggctgaaaccttggcgatgaatcagggtccgacgatgtcgatggatgatcttttagatttcgcggatcgtttccctcagttagcgcagcatattatccagcctgctgaggttgatcccacgcatagttctgcgcatgattttgttcgggattattttgccacccacaaaaactacattgattcgctcgatcgccttggagaggagttggcaactgccattggtcagccgggacttcgggttactaggctcgcgcagttgcttgatgcggagtacaacatcacggtgcgtttccgggcgccggatattactggccggaggcactttgatccccaatcgcgtcagattctgctgcggcaagatctcagcgaggcgcagcagtgtttccagttggcggaggaattgacgtttcttgctcatgcagagctcttggataccctgaccacagatcaaccggatctcccttctgaggcagctatccgcctggctaaggtgggtctctcccaatatttcgcggctgctgttgtcatgccgtacacccgctttttggaattcgcccaggataagcactatgacatcgagttgatctctgaggcgtttggagtgtctttcgagtctgcatgccaccgcctgtctactctgcagcgttcgggggcgtcaggggtgccgtttttctttgtgcgctcggatcgtgcaggaaatatctccaagcggcaatctgcagctacgttccacttctcgcgaacagacggcacttgtcctttgtgggcgctgcatcgtgcttttgaacgtcagggaaacatcacccgccaggttgctcgcatgccggatggccggacctatttgtggctcgcacgcgcggtgaaaggtcgaactcatggtttcgggtatcctgctgcggaattcgccatcggcctgggctgcgatatcagcgaggcaccaggcttggtgtattcccaaggccttaatttggatcccgagtccgccgcagagatcggccctggttgtcggatctgtcctcgggagaactgtgtgcagcgtgcattcccaccatcgggtcaagaatctatccgcccagcccctgtccaactcctcaactaaaaaggcagcacttaaaaaac

SEQ ID NO: 1096 - protein, 441 aa, Corynebacterium glutamicum
MSKLYAGARINALRRTHQLTQSALADKLDLSTSYLNQLENDGRPLTATVLLQLMKVFDVEASYFSPDRGTATATRLAETLAMNQGPTMSMDDLLDFADRFPQLAQHIIQPAEVDPTHSSAHDFVRDYFATHKNYIDSLDRLGEELATAIGQPGLRVTRLAQLLDAEYNITVRFRAPDITGRRHFDPQSRQILLRQDLSEAQQCFQLAEELTFLAHAELLDTLTTDQPDLPSEAAIRLAKVGLSQYFAAAVVMPYTRFLEFAQDKHYDIELISEAFGVSFESACHRLSTLQRSGASGVPFFFVRSDRAGNISKRQSAATFHFSRTDGTCPLWALHRAFERQGNITRQVARMPDGRTYLWLARAVKGRTHGFGYPAAEFAIGLGCDISEAPGLVYSQGLNLDPESAAEIGPGCRICPRENCVQRAFPPSGQESIRPAPVQLLN

SEQ ID NO: 1097 - DNA, 1024 bp, Corynebacterium glutamicum
  CDS (101)..(1024): FRXA02337
cacaaggtaaaatttgtgtaattgtgtcgtgtggatttgaaggtttttgtaaatctagttaaatcatgaggtcataagcttttcgggaggttgtcaaaggatgtcgaagctttacgcgggggcaaggatcaatgcactgcgccgaacccatcagctcacccaatcagcattggccgacaagcttgatctctccaccagctatctcaaccagttggaaaatgacggacggccactcactgccacggtgcttctgcagctgatgaaagtgttcgatgttgaggccagttacttctcccctgaccggggtacggccactgctacccgactggctgaaaccttggcgatgaatcagggtccgacgatgtcgatggatgatcttttagatttcgcggatcgtttccctcagttagcgcagcatattatccagcctgctgaggttgatcccacgcatagttctgcgcatgattttgttcgggattattttgccacccacaaaaactacattgattcgctcgatcgccttggagaggagttggcaactgccattggtcagccgggacttcgggttactaggctcgcgcagttgcttgatgcggagtacaacatcacggtgcgtttccgggcgccggatattactggccggaggcactttgatccccaatcgcgtcagattctgctgcggcaagatctcagcgaggcgcagcagtgtttccagttggcggaggaattgacgtttcttgctcatgcagagctcttggataccctgaccacagatcaaccggatctcccttctgaggcagctatccgcctggctaaggtgggtctctcccaatatttcgcggctgctgttgtcatgccgtacacccgctttttggaattcgcccaggataagcactatgacatcgagttgatctctgaggcgtttggagtgtctttcgagtctgcatgccaccgcctgtctactctgcagcgttcgggggcgtcaggggtgccgtttttctttgtgcgctcggatcgtgcagga

SEQ ID NO: 1098 - protein, 308 aa, Corynebacterium glutamicum
MSKLYAGARINALRRTHQLTQSALADKLDLSTSYLNQLENDGRPLTATVLLQLMKVFDVEASYFSPDRGTATATRLAETLAMNQGPTMSMDDLLDFADRFPQLAQHIIQPAEVDPTHSSAHDFVRDYFATHKNYIDSLDRLGEELATAIGQPGLRVTRLAQLLDAEYNITVRFRAPDITGRRHFDPQSRQILLRQDLSEAQQCFQLAEELTFLAHAELLDTLTTDQPDLPSEAAIRLAKVGLSQYFAAAVVMPYTRFLEFAQDKHYDIELISEAFGVSFESACHRLSTLQRSGASGVPFFFVRSDRAG

SEQ ID NO: 1099 - DNA, 515 bp, Corynebacterium glutamicum
  CDS (1)..(492): RXN02339
cccaccgacaacctcttttcatatcctgcacaacgctatgatcttctcacacttgcctttgaagttaggattggggacatggttcaaattaatgacatgcttgcccctcctccagtaaaacttccggaagatcctgccctcggcgccgatccaactttgacctcgacagcgattgcgcatcctgacagcccattggtgtgggcgtaccgagctgaaaatcttatcaaatctgcatcaaatgatgaagagaagattcaggcctacgcttttgcgcgcacgggttaccaccgcagtctcgatcgtctgcgtgccaatggttggaagggttggggtcctgtccccttctctcatgagccaaaccagggagtgttgcgggctatcgcttccctagctcttgctgcgaagctgattggtgaggacaacgaatacgatcgttgccgccagatgctctctgatgcggatccagagtccgtcgcagtcctactcgacaaataaaccaccaaaaataaaacaat

SEQ ID NO: 1100 - protein, 164 aa, Corynebacterium glutamicum
PTDNLFSYPAQRYDLLTLAFEVRIGDMVQINDMLAPPPVKLPEDPALGADPTLTSTAIAHPDSPLVWAYRAENLIKSASNDEEKIQAYAFARTGYHRSLDRLRANGWKGWGPVPFSHEPNQGVLRAIASLALAAKLIGEDNEYDRCRQMLSDADPESVAVLLDK

SEQ ID NO: 1101 - DNA, 515 bp, Corynebacterium glutamicum; identical to SEQ ID NO: 1099
  CDS (1)..(492): FRXA02339

SEQ ID NO: 1102 - protein, 164 aa, Corynebacterium glutamicum; identical to SEQ ID NO: 1100

SEQ ID NO: 1103 - DNA, 1188 bp, Corynebacterium glutamicum
  CDS (101)..(1165): RXN02340
aaaacgtgtctaaaaattcagtttttattgctgctgatcacctcttgaagaactcaacccaaaagtgcttcaagttatgagaaagtgaaatccaacacccatgaaaaagagcatcgttgtatttgaagtcgaaggcggctccgacaagcacttcgacggtcaccgtaaagacaccatgcctatcgtcaactccataaatgatgctggctggcaggcagaggttgtgtactaccgcccagagtggaccgaaggtctctttgagtacgtatctgaaaacttcgacggctacatctcacgtgtcaacccaggcaacatcccaggcggcgagcgcggctactttgacctgctcacccgcctgtccgaagcagggctcgtgggcatgtccacccctgaggaaatgatggcatacggcgcgaaagatgcgctggtcaagctatcccaaaccgacctggtgccatccgacaccgaggcgtactacgacgtggagaccttccacaaggttttcccaacctccctgtccttcggtgagcgcgtgctcaagcaaaaccgtggctccaccggctccggcatttggcgcgtccagttggtagacaaggaactggctgcatccatcgagccaggcaccgcactgccattggacactgaaatcaagtgcaccgaagcagtcgacaaccacactgaagtccgcaagctcggcgagttcatggatttctgtgaccagtacatcatcggcgacaacggcatgctcgttgatatgcgtttcatgccacgcatcgtcgaaggcgaaatccgcatccttctcgtcggaccacacccagtgttcgtcgtgcacaagaagccagcagaaggcggcgacaacttctccgcaaccctgttctccggcgcgaagtacacctacgacaagccagagcagtggcaggaactgattgacctcttcgcagacgctcgcccagtcatcgcagaaaagctcggcggcgacaacatcccattgatctggaccgcagacttcatgctcggcgatgtcgttgacggcaaggacacctacgtgctcggtgaaatcaactgctcctgcgtcggcttcacctccgagctggacatgggcatccagcagcttgtggcatcagaggccatcaagcgcatcgaggaattcgcgcagcttactgtttaaaactttgcttctcgacgtct

SEQ ID NO: 1104 - protein, 355 aa, Corynebacterium glutamicum
MKKSIVVFEVEGGSDKHFDGHRKDTMPIVNSINDAGWQAEVVYYRPEWTEGLFEYVSENFDGYISRVNPGNIPGGERGYFDLLTRLSEAGLVGMSTPEEMMAYGAKDALVKLSQTDLVPSDTEAYYDVETFHKVFPTSLSFGERVLKQNRGSTGSGIWRVQLVDKELAASIEPGTALPLDTEIKCTEAVDNHTEVRKLGEFMDFCDQYIIGDNGMLVDMRFMPRIVEGEIRILLVGPHPVFVVHKKPAEGGDNFSATLFSGAKYTYDKPEQWQELIDLFADARPVIAEKLGGDNIPLIWTADFMLGDVVDGKDTYVLGEINCSCVGFTSELDMGIQQLVASEAIKRIEEFAQLTV

SEQ ID NO: 1105 - DNA, 580 bp, Corynebacterium glutamicum
  CDS (101)..(580): FRXA02338
aaaacgtgtctaaaaattcagtttttattgctgctgatcacctcttgaagaactcaacccaaaagtgcttcaagttatgagaaagtgaaatccaacacccatgaaaaagagcatcgttgtatttgaagtcgaaggcggctccgacaagcacttcgacggtcaccgtaaagacaccatgcctatcgtcaactccataaatgatgctggctggcaggcagaggttgtgtactaccgcccagagtggaccgaaggtctctttgagtacgtatctgaaaacttcgacggctacatctcacgtgtcaacccaggcaacatcccaggcggcgagcgcggctactttgacctgctcacccgcctgtccgaagcagggctcgtgggcatgtccacccctgaggaaatgatggcatacggcgcgaaagatgcgctggtcaagctatcccaaaccgacctggtgccatccgacaccgaggcgtactacgacgtggagaccttccacaaggttttcccaacctccctgtccttcggtgaagcgcgtgctcaagcaaaaacctggcttcaccggcttccgcatttggcgcgt

SEQ ID NO: 1106 - protein, 160 aa, Corynebacterium glutamicum
MKKSIVVFEVEGGSDKHFDGHRKDTMPIVNSINDAGWQAEVVYYRPEWTEGLFEYVSENFDGYISRVNPGNIPGGERGYFDLLTRLSEAGLVGMSTPEEMMAYGAKDALVKLSQTDLVPSDTEAYYDVETFHKVFPTSLSFGEARAQAKTWLHRLPHLAR

SEQ ID NO: 1107 - DNA, 662 bp, Corynebacterium glutamicum
  CDS (1)..(639): FRXA02340
gagcgcgtgctcaagcaaaaccgtggctccaccggctccggcatttggcgcgtccagttggtagacaaggaactggctgcatccatcgagccaggcaccgcactgccattggacactgaaatcaagtgcaccgaagcagtcgacaaccacactgaagtccgcaagctcggcgagttcatggatttctgtgaccagtacatcatcggcgacaacggcatgctcgttgatatgcgtttcatgccacgcatcgtcgaaggcgaaatccgcatccttctcgtcggaccacacccagtgttcgtcgtgcacaagaagccagcagaaggcggcgacaacttctccgcaaccctgttctccggcgcgaagtacacctacgacaagccagagcagtggcaggaactgattgacctcttcgcagacgctcgcccagtcatcgcagaaaagctcggcggcgacaacatcccattgatctggaccgcagacttcatgctcggcgatgtcgttgacggcaaggacacctacgtgctcggtgaaatcaactgctcctgcgtcggcttcacctccgagctggacatgggcatccagcagcttgtggcatcagaggccatcaagcgcatcgaggaattcgcgcagcttactgtttaaaactttgcttctcgacgtct

SEQ ID NO: 1108 - protein, 213 aa, Corynebacterium glutamicum
ERVLKQNRGSTGSGIWRVQLVDKELAASIEPGTALPLDTEIKCTEAVDNHTEVRKLGEFMDFCDQYIIGDNGMLVDMRFMPRIVEGEIRILLVGPHPVFVVHKKPAEGGDNFSATLFSGAKYTYDKPEQWQELIDLFADARPVIAEKLGGDNIPLIWTADFMLGDVVDGKDTYVLGEINCSCVGFTSELDMGIQQLVASEAIKRIEEFAQLTV

SEQ ID NO: 1109 - DNA, 609 bp, Corynebacterium glutamicum
  CDS (101)..(586): RXN02341
cgcgactggcggagaaattcgtgttcgcgatgcttcgggcaccgttcacaccctcaacgccggtgaaattacgcaccttcgcctgcagtaaggtgacggtatggggaattcacttgagaaacatattgcagagggagaccggatccacgtcgatctgacatctcctttatccgcaatgttgttccccatttttgaactcattgtgattactggaatctgttggatgggcatcggctttttggatcagcttccaggaatcgatggcaccaaccccgccgatagcttccccgaaggcacccgcaatcttctagtgggtgtgtgggcagtacttgctgcatggcgtttcggtcttcctttaataaggcaacgtcgactccgcgtgatcttgagcgaccgcaaactgctggtccgacgcgcgggtctgcgcaccgggttcgattccattccactgagctacattcagcgagtccaacgtcggcgaaacaccctggtcttaggtgttggtggacaccaccgaccctatgtaatcaaccaggttcccaaggctcgaaaagtggaagcgctgctcaaagatcttacattttggtgaaggcgttatagttaggactt

SEQ ID NO: 1110 - protein, 162 aa, Corynebacterium glutamicum
MGNSLEKHIAEGDRIHVDLTSPLSAMLFPIFELIVITGICWMGIGFLDQLPGIDGTNPADSFPEGTRNLLVGVWAVLAAWRFGLPLIRQRRLRVILSDRKLLVRRAGLRTGFDSIPLSYIQRVQRRRNTLVLGVGGHHRPYVINQVPKARKVEALLKDLTFW

SEQ ID NO: 1111 - DNA, 511 bp, Corynebacterium glutamicum
  CDS (101)..(511): FRXA02341
cgcgactggcggagaaattcgtgttcgcgatgcttcgggcaccgttcacaccctcaacgccggtgaaattacgcaccttcgcctgcagtaaggtgacggtatggggaattcacttgagaaacatattgcagagggagaccggatccacgtcgatctgacatctcctttatccgcaatgttgttccccatttttgaactcattgtgattactggaatctgttggatgggcatcggctttttggatcagcttccaggaatcgatggcaccaaccccgccgatagcttccccgaaggcacccgcaatcttctagtgggtgtgtgggcagtacttgctgcatggcgtttcggtcttcctttaataaggcaacgtcgactccgcgtgatcttgagcgaccgcaaactgctggtccgacgcgcgggtctgcgcaccgggttcgattccattccactgagctacattcagcgagtccaacgtcggcgaaacaccctggtcttaggtgttggtggacac

SEQ ID NO: 1112 - protein, 137 aa, Corynebacterium glutamicum
MGNSLEKHIAEGDRIHVDLTSPLSAMLFPIFELIVITGICWMGIGFLDQLPGIDGTNPADSFPEGTRNLLVGVWAVLAAWRFGLPLIRQRRLRVILSDRKLLVRRAGLRTGFDSIPLSYIQRVQRRRNTLVLGVGGH

SEQ ID NO: 1113 - DNA, 2556 bp, Corynebacterium glutamicum
  CDS (101)..(2533): RXN02360
aagtaactaaagttcgaaagtatttccgaacggtgtcggcctctgcgcatacactgtatttttaaagaaaattcttctcaattctaagggtgaatatccaatgcgtggtgacgttcaaaaaataaccaaggtttatgacggcaagcaccgaaccttggaaatcccggtttatcaacgcaattacgactggactgaaaagcaatgttcacgcctctttgatgacctcagcgaagtggtcaaagaaaaccaccgtcaacatttttttggagctgtggttggtaagcctcaaggcagctggacctgggttgtcatcgatggacagcagcgtcttacaacaatcagcttgttcatgcttgcgctggtacattccttgcgcgcatctgaagttgaagaaggtgagtttaatgctggctacaacattgatctagccacattgattgaggatgactacctccgatccggcaatgagggaaacctcaagttcaagctcaagccagttaaaaacgataatgaggcttatcaaaagctcttcggcccagaatctgaattcatagagtcctcaaacctcactgctaattatcgctacttccgcaatgtccttaaggcaaccgatctcaccgcagctcaactatgggaagctatcgagaaactcagggtcatgtatcttgaccttgaggaatttgatgatccgcagcgaatctttgaaagtctcaactccacgggattagagctcagtgaagctgataaggtacgcaacttggttcttatggatcaggagctcaaaacccaagaaaagctctatgagcagcgttggaatcccattgaagtctgcgtgaaatttgataccgacaatttcattcgctggtacttaactctcaaaaccgcgcgcaccccaagaaagcaagatgtttatgaggaattcaagaaattcatccgtaactccaagctcccggtcgaattcatcctcgacgatatgtacgagtacgcgaagctgtaccgagatctcttaggtgccactactgggtttatagctgccgataggtgtcttaagcgttttgtccctgtcatgggcgatgtggttttgccttttctgctgcctgttctcaaagatgctaaagacggcatcatcaccgaatcagacttcctcggagttctaaaagttctggaatcctatttattccgccgttttgcagtcggggttgctagtaacgccttaagcaagatcttctccactgcttatagcgacatcaagaaattctggactccagggcaaagttatagctcactgctggcctacattctgaaacgtcgcgatggttccgggcgttttccctccgacagtgaattccgtgagaacttcgcaaccaaaaatttctggaatattcataacgaaaacaggcgttacttatttgattgtctagaaaatgccgattccaatgatgttcgtgacatccaaacaagtctggatgaaggatctctctccattgaacacatcatgccacgtagcctaaacgatcagtggagagctgaactcggccctgaatatgctcgaattcatgagacttggattaatagaattggtaacctcaccatcaccggctacaactccgcctattcaaattcttcctatgagcgcaagcggacgatggaaaatggatttttggtatccccctatcgcatcaataatttcatcaaaaagcagaagcattggtctgaagaacagctaattgagcgaaccgagctgctcactcaagcagcgctggactactggccccttccaaaagaaaccttccagccaccacaagctgtgcttcctacagaatccttagatagtgatctttctttccgcggacgcgaaattgtcgcctttgaatatgaggactacaaggaaacggtaacgtcctgggcagacatgctccagagcgttctaaaagtcttgaaccaatccttccgccaggaactcatagctttgaccaatgaagaaatctgcctggcaacttcaaacaacagtaacagcagtctccgtgaaattgaccacgggctttttgtagacactggctctagtacgagtgtaaagattggcttcctccgcagagtttttactcaactggggctagagcaggaagcattggttttcacccttcgaccactggcaaatgatgtagaaccccgagatgatgaactcgaggtagaggtagaaaagaaatattccgatttgactaaattcatcccacagttagaagaagctgagaatctcgagggggcggatacagaggttattcctctcctctcaaagctcaaggaacaactgacagcctttagcccggagaatcctcaagcagccctagggggcctacctgttccagaattcctcaaacaaaatgtgattgaacaactaagcgcagagcacatccttgctgtactcactcaacactttaatatcgcatccatgatgggtgatgactatttgctcgaagagctcaggtcaggccgcttaagggaattactgcagcgtttagaggaattggatagctaatagccgtagtcggtggtcaa

SEQ ID NO: 1114 - protein, 811 aa, Corynebacterium glutamicum
MRGDVQKITKVYDGKHRTLEIPVYQRNYDWTEKQCSRLFDDLSEVVKENHRQHFFGAVVGKPQGSWTWVVIDGQQRLTTISLFMLALVHSLRASEVEEGEFNAGYNIDLATLIEDDYLRSGNEGNLKFKLKPVKNDNEAYQKLFGPESEFIESSNLTANYRYFRNVLKATDLTAAQLWEAIEKLRVMYLDLEEFDDPQRIFESLNSTGLELSEADKVRNLVLMDQELKTQEKLYEQRWNPIEVCVKFDTDNFIRWYLTLKTARTPRKQDVYEEFKKFIRNSKLPVEFILDDMYEYAKLYRDLLGATTGFIAADRCLKRFVPVMGDVVLPFLLPVLKDAKDGIITESDFLGVLKVLESYLFRRFAVGVASNALSKIFSTAYSDIKKFWTPGQSYSSLLAYILKRRDGSGRFPSDSEFRENFATKNFWNIHNENRRYLFDCLENADSNDVRDIQTSLDEGSLSIEHIMPRSLNDQWRAELGPEYARIHETWINRIGNLTITGYNSAYSNSSYERKRTMENGFLVSPYRINNFIKKQKHWSEEQLIERTELLTQAALDYWPLPKETFQPPQAVLPTESLDSDLSFRGREIVAFEYEDYKETVTSWADMLQSVLKVLNQSFRQELIALTNEEICLATSNNSNSSLREIDHGLFVDTGSSTSVKIGFLRRVFTQLGLEQEALVFTLRPLANDVEPRDDELEVEVEKKYSDLTKFIPQLEEAENLEGADTEVIPLLSKLKEQLTAFSPENPQAALGGLPVPEFLKQNVIEQLSAEHILAVLTQHFNIASMMGDDYLLEELRSGRLRELLQRLEELDS

SEQ ID NO: 1115 - DNA, 2556 bp, Corynebacterium glutamicum; identical to SEQ ID NO: 1113
  CDS (101)..(2533): FRXA02360

SEQ ID NO: 1116 - protein, 811 aa, Corynebacterium glutamicum; identical to SEQ ID NO: 1114

SEQ ID NO: 1117 - DNA, 774 bp, Corynebacterium glutamicum
  CDS (101)..(751): RXN02361
tagaggaattggatagctaatagccgtagtcggtggtcaaactttgaccaccggactcccctttaagcacaatctctagcttttatttaggcttggagttatggaacttctctcccacttgcttgctcttgatcctgcctcccctcgtttgactgtttataacgagtccacgggtgcgcgtttggatttctccgccatcactcttgataactgggcgtccaaggttggcaatatgctccttgaggaattggatctggaggaaggctcgctcatcactattgatttgccggtgagctggcaggccgcaatgattatgctcggcgctttagcaactagtgttgaggtctcttttgatgatcccgaggcagatgccatctttacctccctcgatagattttcccactacaagggccatagtgatgtgctgattgtcagcgaggatccttttggtcgtggagttgttgaaggtggcggtgaactgcctaatggtgccatcgattttggccccacagtgcgtttttatggcgatcaattcttccagcctacccgcacattgccggaaatcatccagcattctgatgttccggttggcgccagagttcttgcaactggttggtcagatatcgagtccttcaatcaccaggttttagaaccactcgcagtgggtggctctgcagtaattgtgaccggactggctgatattgagcgtttaaaccagattgcaaccaatgagaagacaacccaccgtatctaggcaaatttcggttactacta

SEQ ID NO: 1118 - protein, 217 aa, Corynebacterium glutamicum
MELLSHLLALDPASPRLTVYNESTGARLDFSAITLDNWASKVGNMLLEELDLEEGSLITIDLPVSWQAAMIMLGALATSVEVSFDDPEADAIFTSLDRFSHYKGHSDVLIVSEDPFGRGVVEGGGELPNGAIDFGPTVRFYGDQFFQPTRTLPEIIQHSDVPVGARVLATGWSDIESFNHQVLEPLAVGGSAVIVTGLADIERLNQIATNEKTTHRI

SEQ ID NO: 1119 - DNA, 774 bp, Corynebacterium glutamicum; identical to SEQ ID NO: 1117
  CDS (101)..(751): FRXA02361

SEQ ID NO: 1120 - protein, 217 aa, Corynebacterium glutamicum; identical to SEQ ID NO: 1118

SEQ ID NO: 1121 - DNA, 732 bp, Corynebacterium glutamicum
  CDS (101)..(709): RXN02367
ggcacttgaatccggacgctaagttgttgatacatcaacttatttcttggctatacttgaggtcacgtttcctcagctcaggagaagttcggagaagtccatgtcaaacgcagaaattaatcccgttgaatatgaaatcaacaaccacgcccctggtaccgcgctaaacccacagtgcgaagacggcgccaacgtagaaatcatcacctcccgtgaagtccccctcggcggaccacgcgccatgaccgtgcaccgcacactcccccaacgccagcgctccctcatcggtgcctggtgttttgtggatcattacggccccgatgatgtctcactaaccggtggcatggatatggcctcccacccgcacaccggattgcaaacagtcacgtggctttttgaaggcgaagtcacccaccatgattccggcggaaatcacgcagtcgtgcttcctggcgaagtcaacctcatgaccgccggcgcaggcatctgtcacaccgaagtttccgccacctccaccacgattctgcatggtctgcagttgtggacagttcttcccgacaaagaccgcgaaggaccacgccgctttgatcactacgctccagaagaaatcacactcgaaggcggaagtgcacgcgttttcctaggttcgctatttggtcaaacctcccctgttcatacgtttactggctcttcctgttttagagtgcattgatcttatggaccaactgccct

SEQ ID NO: 1122 - protein, 203 aa, Corynebacterium glutamicum
MSNAEINPVEYEINNHAPGTALNPQCEDGANVEIITSREVPLGGPRAMTVHRTLPQRQRSLIGAWCFVDHYGPDDVSLTGGMDMASHPHTGLQTVTWLFEGEVTHHDSGGNHAVVLPGEVNLMTAGAGICHTEVSATSTTILHGLQLWTVLPDKDREGPRRFDHYAPEEITLEGGSARVFLGSLFGQTSPVHTFTGSSCFRVH

SEQ ID NO: 1123 - DNA, 732 bp, Corynebacterium glutamicum; identical to SEQ ID NO: 1121
  CDS (101)..(709): FRXA02367

SEQ ID NO: 1124 - protein, 203 aa, Corynebacterium glutamicum; identical to SEQ ID NO: 1122

SEQ ID NO: 1125 - DNA, 798 bp, Corynebacterium glutamicum
  CDS (101)..(775): RXN02368
cttaggtcaagcttgcatttattggctagtgtcggaaatcatgggagatttagcaaagcacatgggcagtgaaccaccagcatggtggaagtttttaccgatgattgtcctcgctggagccactcgagttacctatgaagtagaaccttggctggcgatcccattattcattttggcttttgcatcgatattgatcccattcccgatctctaagacaaaaggactccgtgatatcgatgcctggaaaatccacaccacgcaaggcgataaaaagcgtgccatccgccaactgatcattccggctacggctttggccatcgacatcattgggctgccgacattatttaatgcccctccccttgcttccgctgcactttttggcggtgtttacggcgcttccctagcttgggctgcgtacagagctgatcagcttccacgcattcgaacgaaggaacgcctcgcagaactttcacaaaatgcatctctggatgatgtgcgctcagatgacttagatgttctagagcagccggaatcccgtgaattagtgcgctgtctgcttgcccacggtgcgatggatggcactcgggtgatggccagacaggtcgcgcgagtactggataccgaggtagacgaagtacatcaggtagcacgctcactagaacagcatggtttggttagtcgctccaccatcatgccgggtggggatccaggaaaagtattcatcgaagtttccctgaaagggatctcagccatcaaggcacttgaatccggacgctaagttgttgatacatcaactta

SEQ ID NO: 1126 - protein, 225 aa, Corynebacterium glutamicum
MIVLAGATRVTYEVEPWLAIPLFILAFASILIPFPISKTKGLRDIDAWKIHTTQGDKKRAIRQLIIPATALAIDIIGLPTLFNAPPLASAALFGGVYGASLAWAAYRADQLPRIRTKERLAELSQNASLDDVRSDDLDVLEQPESRELVRCLLAHGAMDGTRVMARQVARVLDTEVDEVHQVARSLEQHGLVSRSTIMPGGDPGKVFIEVSLKGISAIKALESGR

SEQ ID NO: 1127 - DNA, 798 bp, Corynebacterium glutamicum; identical to SEQ ID NO: 1125
  CDS (101)..(775): FRXA02368

SEQ ID NO: 1128 - protein, 225 aa, Corynebacterium glutamicum; identical to SEQ ID NO: 1126

SEQ ID NO: 1129 - DNA, 1146 bp, Corynebacterium glutamicum
  CDS (101)..(1123): RXN02381
aagtttgaagaagtaatcaagctcccctgtgaggactcgttgtagtcttttatttagttaataaaagatttcataccaacttgtcagcaggggagctttcatgtctgtcacaaacttccgtcggtttcttgctggcatagcggtcatcgcggcgtgtgttgctgcgactccaacagctcaggcacaaagcagtggctcttctggatcctctggttcttcagcgggatctagcgggctgtgggatttactttttccagaatcccatgagtcttttatcgagcggcttcttgatcctttggatgacagccatatatctattcaccctgacctcaccccagacctgtatgaagaggtgtttgatccaccgcaaattggtgaatgcccagccgttgttgctgtggtcgcacgaggcagtgaacaaaaccttcaaatccgacccgcgcgatacagcgaggaatctccatggacatccaatggatttgaggaaaaaaactttcgtagtttctttggccgaatggaaaaacactaccgtgaatcgactggcgagtcgttgatgaaagacgtctacgtgatgggtctgaataatatcgaataccctgcttctttgccactgtcttcggagggaagcagcgccattgaattgggcacttccatttctagtggtcgcgacaatgtcatcagcgcgattgatcgctttgaatcagcgacagggtgcacgccgaagtacctgttggcgggttattctcaaggtgtcctcatcgttgatggctatgaagaggagttgattgcgagggatcagtacctcggcaccctgcacatcgcgaatccagcgcaacaagttgatgatccaacacttgttgggcatgaagtaaccacgggaggcttggctagttccgtggagcccgtcgaggacaatcctttcaaggtgagctactgcctgcctggagacatcgtgtgcgatcgttcttttgaacagttctctgctgcgggatcctctatagcagctgcgcaattgagcaccggaaatatccgtccaggtcgagtacacgtgcaatacttcgttaccacccaaccgtgggatgagcagatttttgacgaagtcgcatcgtggattgaagctgcctaaaaactcgcgaggacgcatgc

SEQ ID NO: 1130 - protein, 341 aa, Corynebacterium glutamicum
MSVTNFRRFLAGIAVIAACVAATPTAQAQSSGSSGSSGSSAGSSGLWDLLFPESHESFIERLLDPLDDSHISIHPDLTPDLYEEVFDPPQIGECPAVVAVVARGSEQNLQIRPARYSEESPWTSNGFEEKNFRSFFGRMEKHYRESTGESLMKDVYVMGLNNIEYPASLPLSSEGSSAIELGTSISSGRDNVISAIDRFESATGCTPKYLLAGYSQGVLIVDGYEEELIARDQYLGTLHIANPAQQVDDPTLVGHEVTTGGLASSVEPVEDNPFKVSYCLPGDIVCDRSFEQFSAAGSSIAAAQLSTGNIRPGRVHVQYFVTTQPWDEQIFDEVASWIEAA

SEQ ID NO: 1131 - DNA, 1146 bp, Corynebacterium glutamicum; identical to SEQ ID NO: 1129
  CDS (101)..(1123): FRXA02381

SEQ ID NO: 1132 - protein, 341 aa, Corynebacterium glutamicum; identical to SEQ ID NO: 1130

SEQ ID NO: 1133 - DNA, 736 bp, Corynebacterium glutamicum
  CDS (101)..(736): RXN02383
gggcaacaatgtggaaaacgcccagtggtatcttgacggctggaacatgggtgttacgcagtaaagaagatggcaataaaaatgtggaggagtaaaggcgatgccagttcgggtaattgttgattcctccgcatgcttgccaacgcatgtggccgaggacctcgacatcacggtgattaacttgcacgtgatgaataacggtgaagaacgcagtacatccgggttgtcgtcgttggaacttgcagcaagttacgcccgccagcttgaacgcggtggcgatgacggtgtgcttgcgctgcatatttctaaagagctctcgtccacgtggtccgcagcggtgacagcagccgctgtgtttgatgatgattctgtgcgcgtggtggataccagttcgctcggtatggctgtgggtgctgccgcgatggctgctgcccgcatggctaaagatggcgcgtctttgcaggaatgctacgacatcgcggtggataccttgaagcgttcagaaacctggatctacctgcaccgcattgatgaaatctggaagtcgggacggatttccactgcaaccgccatggtgtcaacggctctggcaacccgccccatcatgcgtttcaacggtggtcgcatggagatcgccgctaagacccgcacccaatctaaagcgtttgccaaattggtggaattagcccagatcagggcagatggtgaacccgtattcattgcgattggccaaaac

SEQ ID NO: 1134 - protein, 212 aa, Corynebacterium glutamicum
MPVRVIVDSSACLPTHVAEDLDITVINLHVMNNGEERSTSGLSSLELAASYARQLERGGDDGVLALHISKELSSTWSAAVTAAAVFDDDSVRVVDTSSLGMAVGAAAMAAARMAKDGASLQECYDIAVDTLKRSETWIYLHRIDEIWKSGRISTATAMVSTALATRPIMRFNGGRMEIAAKTRTQSKAFAKLVELAQIRADGEPVFIAIGQN

SEQ ID NO: 1135 - DNA, 703 bp, Corynebacterium glutamicum
  CDS (101)..(703): FRXA02383
gggcaacaatgtggaaaacgcccagtggtatcttgacggctggaacatgggtgttacgcagtaaagaagatggcaataaaaatgtggaggagtaaaggcgatgccagttcgggtaattgttgattcctccgcatgcttgccaacgcatgtggccgaggacctcgacatcacggtgattaacttgcacgtgatgaataacggtgaagaacgcagtacatccgggttgtcgtcgttggaacttgcagcaagttacgcccgccagcttgaacgcggtggcgatgacggtgtgcttgcgctgcatatttctaaagagctctcgtccacgtggtccgcagcggtgacagcagccgctgtgtttgatgatgattctgtgcgcgtggtggataccagttcgctcggtatggctgtgggtgctgccgcgatggctgctgcccgcatggctaaagatggcgcgtctttgcaggaatgctacgacatcgcggtggataccttgaagcgttcagaaacctggatctacctgcaccgcattgatgaaatctggaagtcgggacggatttccactgcaaccgccatggtgtcaacggctctggcaacccgccccatcatgcgtttcaacggtggtcgcatggagatcgccgctaagacccgcacccaatctaaagcgtttgccaaattggtggaattagcccagatcagggcagat

SEQ ID NO: 1136 - protein, 201 aa, Corynebacterium glutamicum
MPVRVIVDSSACLPTHVAEDLDITVINLHVMNNGEERSTSGLSSLELAASYARQLERGGDDGVLALHISKELSSTWSAAVTAAAVFDDDSVRVVDTSSLGMAVGAAAMAAARMAKDGASLQECYDIAVDTLKRSETWIYLHRIDEIWKSGRISTATAMVSTALATRPIMRFNGGRMEIAAKTRTQSKAFAKLVELAQIRAD

SEQ ID NO: 1137 - DNA, 885 bp, Corynebacterium glutamicum
  CDS (101)..(862): RXN02387
gctagccccgattcgcttcaggtcaccaccttgaaggccagcgaaattactcagggtgaattgttggatgcgttaagcccatccttgtttgctgaagaccgtgtggtggtgcttaccaacatggatcaaagcaggccaagatgctgtagatctagccttatccgcagcagttgatcccagccctggtacctacttgatcgtcatgcactctggcggtggacgctctaagtcgatggtgaagaagctggaaaaagtcgcggtggtgcacgatgccgcaaagctgaaagaccgggatcgtccaggttgggtaaaacaagagttcaaaaaccacaaagtccaggtcaccccagatgtcattcatgctcttttagagggcgtgggttcagatcttagagagctggcgtccgccgtatcccaattggttgaggacacccaaggcaacgtgacggtggaaaaagtccgtgcctattacgtgggtgttgctgaggtatcgggtttcgacatcgccgattctgcatgcgccggtcaaatgtcaaaggccgtggccagcaccagacgtgcccttcaattgggtaccagcccggttgcattggcagctgcgttgagtatgaaagttggccagatcgccaggctgtattccaccaggggacgcatcaacggttttgagctggccaaagaattgggcatgccgccgttcgtggtggagaagactgcgaaagtggcccgaaactggtcgggagatgcggtcagcgaggccgtgattttgatggccgatctggatgccgctgtaaaaggacaaagtggcgatcctgaatttgccatcgaatctgccgtgagaagagttgcagagctggcgaggcggtaacgctgaacggcggcgggtaa

SEQ ID NO: 1138 - protein, 254 aa, Corynebacterium glutamicum
VWWCLPTWIKAGQDAVDLALSAAVDPSPGTYLIVMHSGGGRSKSMVKKLEKVAVVHDAAKLKDRDRPGWVKQEFKNHKVQVTPDVIHALLEGVGSDLRELASAVSQLVEDTQGNVTVEKVRAYYVGVAEVSGFDIADSACAGQMSKAVASTRRALQLGTSPVALAAALSMKVGQIARLYSTRGRINGFELAKELGMPPFVVEKTAKVARNWSGDAVSEAVILMADLDAAVKGQSGDPEFAIESAVRRVAELARR

SEQ ID NO: 1139 - DNA, 778 bp, Corynebacterium glutamicum
  CDS (101)..(778): FRXA02387
gctagccccgattcgcttcaggtcaccaccttgaaggccagcgaaattactcagggtgaattgttggatgcgttaagcccatccttgtttgctgaagaccgtgtggtggtgcttaccaacatggatcaaagcaggccaagatgctgtagatctagccttatccgcagcagttgatcccagccctggtacctacttgatcgtcatgcactctggcggtggacgctctaagtcgatggtgaagaagctggaaaaagtcgcggtggtgcacgatgccgcaaagctgaaagaccgggatcgtccaggttgggtaaaacaagagttcaaaaaccacaaagtccaggtcaccccagatgtcattcatgctcttttagagggcgtgggttcagatcttagagagctggcgtccgccgtatcccaattggttgaggacacccaaggcaacgtgacggtggaaaaagtccgtgcctattacgtgggtgttgctgaggtatcgggtttcgacatcgccgattctgcatgcgccggtcaaatgtcaaaggccgtggccagcaccagacgtgcccttcaattgggtaccagcccggttgcattggcagctgcgttgagtatgaaagttggccagatcgccaggctgtattccaccaggggacgcatcaacggttttgagctggccaaagaattgggcatgccgccgttcgtggtggagaagactgcgaaagtggcccgaaactggtcgggagatgcggtcagcgaggccgtgattttgatggccgatctg

SEQ ID NO: 1140 - protein, 226 aa, Corynebacterium glutamicum
VWWCLPTWIKAGQDAVDLALSAAVDPSPGTYLIVMHSGGGRSKSMVKKLEKVAVVHDAAKLKDRDRPGWVKQEFKNHKVQVTPDVIHALLEGVGSDLRELASAVSQLVEDTQGNVTVEKVRAYYVGVAEVSGFDIADSACAGQMSKAVASTRRALQLGTSPVALAAALSMKVGQIARLYSTRGRINGFELAKELGMPPFVVEKTAKVARNWSGDAVSEAVILMADL

SEQ ID NO: 1141 - DNA, 1725 bp, Corynebacterium glutamicum
  CDS (101)..(1702): RXN02398
gtgtccaatgaatgcgttcaataaatgccctctttaagcatattctctgagtgcattcattacaggcgttaattaaatgcgttcatagaagaacttgaaagtggttgaagtgaagaagcgtaatctcctcgtagctcccctcactgcttccctggtgttctgtaacttggctgttgcagcaaacgccgttgaagttgaggccgaatcaccagttgtcatcaatgaagttgaatccaacagcgacccagttggtgactgggtggagttggctaacaccgacaacaacaactccatcgacatttccggttggtccttagtcgatgacaaggaagacctggaaaatgccctcgtccttcctgaaggcactgagattgagtccggtggatactttgttatctacaccgactctgctgattacgtgcctaccaacaacacctttggtggccaggaatacttcggcctcggcaaagatgacactgttactctgcgcaacgctgaaggcgaagtagttgctacctattcctggaaggatctgggcgagcacgcagaaaacacctatggtcgcatcccagatatgactggtgatttcgcaaacaccggcgttccaaccccaggtgcaaagaatgttgctgctgaaggctccggcgaagaagaaggcgttgttgcaaacgcccagcttccattccacaacgttgaaatcaccccaattcacctcggtggagatttcaccggtgaagatatgtccggcgttgatttcgatgcaaacagcaccgcatggatcgccaacaatgacattggaaagatctactccctcgcccacgacatagctaacaacacctacaagctgactggcgaatgggaaaccggctacccagaaggcggcggagagccagacgctgaaggcatcgtcgcagctaccaacggtgacatctacctgtccaccgagcgcaacaacgctgacaagaacgtctctcgcccatccatcctgcgttttgctaccccaactggcaagactggcgtacaaaacgcagttcaggaatgggacctgtctgagttcgtcggcgacattcagcccaatggtggtcttgaggcaatcgcgcagctcgaggacaacatcttcgttgtcggtgtcgaagagacaggtgatgtcatcgttgttgatctttccgctgaccagccagttctggttcaaaggtacgaatcttccttcgacggtgtcatgtcgcttgattacaacgcagcaaccaagcagctcagcgttgtgtgcgacgaagcatgtgacggcttgtctgaaatcctcgaatgggatggcgagaagctgtacaagtccgacgacaagatctacgagcgtccagcaaacctgggcaactgggctaacgaaggcttcggcacctacacctcagagcttaaatgcgagaacggcaacaccgtttctgtcaccagctacctctgggctgacgatgcagcaaccaacgaaggcacctccctcaactccgcacaggtcatcaacggagattgcggcgacgtcaacatccctggagagtcctcttccgacaattcctcttctgactttgcaaccggcagcatcgcaggcgcctttgcaaccgcagtgctcgcagtcgtaggcattgcgggcgcactgggtggattcttccagcagatcctcgcagcgttcccagcattgcagcaggtcatccgtttctaaacccactgcttgaaacactt

SEQ ID NO: 1142 - protein, 534 aa, Corynebacterium glutamicum
VVEVKKRNLLVAPLTASLVFCNLAVAANAVEVEAESPVVINEVESNSDPVGDWVELANTDNNNSIDISGWSLVDDKEDLENALVLPEGTEIESGGYFVIYTDSADYVPTNNTFGGQEYFGLGKDDTVTLRNAEGEVVATYSWKDLGEHAENTYGRIPDMTGDFANTGVPTPGAKNVAAEGSGEEEGVVANAQLPFHNVEITPIHLGGDFTGEDMSGVDFDANSTAWIANNDIGKIYSLAHDIANNTYKLTGEWETGYPEGGGEPDAEGIVAATNGDIYLSTERNNADKNVSRPSILRFATPTGKTGVQNAVQEWDLSEFVGDIQPNGGLEAIAQLEDNIFVVGVEETGDVIVVDLSADQPVLVQRYESSFDGVMSLDYNAATKQLSVVCDEACDGLSEILEWDGEKLYKSDDKIYERPANLGNWANEGFGTYTSELKCENGNTVSVTSYLWADDAATNEGTSLNSAQVINGDCGDVNIPGESSSDNSSSDFATGSIAGAFATAVLAVVGIAGALGGFFQQILAAFPALQQVIRF

SEQ ID NO: 1143 - DNA, 1630 bp, Corynebacterium glutamicum
  CDS (101)..(1630): FRXA02398
gtgtccaatgaatgcgttcaataaatgccctctttaagcatattctctgagtgcattcattacaggcgttaattaaatgcgttcatagaagaacttgaaagtggttgaagtgaagaagcgtaatctcctcgtagctcccctcactgcttccctggtgttctgtaacttggctgttgcagcaaacgccgttgaagttgaggccgaatcaccagttgtcatcaatgaagttgaatccaacagcgacccagttggtgactgggtggagttggctaacaccgacaacaacaactccatcgacatttccggttggtccttagtcgatgacaaggaagacctggaaaatgccctcgtccttcctgaaggcactgagattgagtccggtggatactttgttatctacaccgactctgctgattacgtgcctaccaacaacacctttggtggccaggaatacttcggcctcggcaaagatgacactgttactctgcgcaacgctgaaggcgaagtagttgctacctattcctggaaggatctgggcgagcacgcagaaaacacctatggtcgcatcccagatatgactggtgatttcgcaaacaccggcgttccaaccccaggtgcaaagaatgttgctgctgaaggctccggcgaagaagaaggcgttgttgcaaacgcccagcttccattccacaacgttgaaatcaccccaattcacctcggtggagatttcaccggtgaagatatgtccggcgttgatttcgatgcaaacagcaccgcatggatcgccaacaatgacattggaaagatctactccctcgcccacgacatagctaacaacacctacaagctgactggcgaatgggaaaccggctacccagaaggcggcggagagccagacgctgaaggcatcgtcgcagctaccaacggtgacatctacctgtccaccgagcgcaacaacgctgacaagaacgtctctcgcccatccatcctgcgttttgctaccccaactggcaagactggcgtacaaaacgcagttcaggaatgggacctgtctgagttcgtcggcgacattcagcccaatggtggtcttgaggcaatcgcgcagctcgaggacaacatcttcgttgtcggtgtcgaagagacaggtgatgtcatcgttgttgatctttccgctgaccagccagttctggttcaaaggtacgaatcttccttcgacggtgtcatgtcgcttgattacaacgcagcaaccaagcagctcagcgttgtgtgcgacgaagcatgtgacggcttgtctgaaatcctcgaatgggatggcgagaagctgtacaagtccgacgacaagatctacgagcgtccagcaaacctgggcaactgggctaacgaaggcttcggcacctacacctcagagcttaaatgcgagaacggcaacaccgtttctgtcaccagctacctctgggctgacgatgcagcaaccaacgaaggcacctccctcaactccgcacaggtcatcaacggagattgcggcgacgtcaacatccctggagagtcctcttccgacaattcctcttctgactttgcaaccggcagcatcgcaggcgcctttgcaaccgcagtgctcgcagtcgtaggcatt

SEQ ID NO: 1144 - protein, 510 aa, Corynebacterium glutamicum
VVEVKKRNLLVAPLTASLVFCNLAVAANAVEVEAESPVVINEVESNSDPVGDWVELANTDNNNSIDISGWSLVDDKEDLENALVLPEGTEIESGGYFVIYTDSADYVPTNNTFGGQEYFGLGKDDTVTLRNAEGEVVATYSWKDLGEHAENTYGRIPDMTGDFANTGVPTPGAKNVAAEGSGEEEGVVANAQLPFHNVEITPIHLGGDFTGEDMSGVDFDANSTAWIANNDIGKIYSLAHDIANNTYKLTGEWETGYPEGGGEPDAEGIVAATNGDIYLSTERNNADKNVSRPSILRFATPTGKTGVQNAVQEWDLSEFVGDIQPNGGLEAIAQLEDNIFVVGVEETGDVIVVDLSADQPVLVQRYESSFDGVMSLDYNAATKQLSVVCDEACDGLSEILEWDGEKLYKSDDKIYERPANLGNWANEGFGTYTSELKCENGNTVSVTSYLWADDAATNEGTSLNSAQVINGDCGDVNIPGESSSDNSSSDFATGSIAGAFATAVLAVVGI

SEQ ID NO: 1145 - DNA, 672 bp, Corynebacterium glutamicum
  CDS (101)..(649): RXN02406
cactctgatagccttttctctgaaattgtaccgagcatttgattttgttcccctatcaatgctggttttggtgacaaaaactcggcggaaggaccaccgaatggaaacccttgcagcacaagcgcgcaccctgctagaaaaatggggcgtcgcgccgacgcacgcatctttcgtcgaatccattgcaaaggccatcccgattctgtcgatcctgctgacgctgattgtcaccgtgaatggaatttcaagcggaaatccggtccagccaccagcactggaacaggtacggaccgatgtagtgaacaagatcaactacgaacgcaacctaaagggcctcgtctcgatcagcccggagcttgaattacacacggcagcccaaacaattgcgcagcgaaatgcagactcagattccgaagaaaaagtaccggatccagagggcaacctggtggttctgcaacagaatctgccctatgcaaatgccaacgccgataccatcgttgatcggttcttaaactctcctgatcatgtcaaactactgcttgcaaacgattatgaagccatcggagttggtgtggcctacaagggtgatcatgcgtggatagtggtggagttcactgtagctcccgctgattccgtagaatcaacagagtgaataccaatccgtctgaattc

SEQ ID NO: 1146 - protein, 183 aa, Corynebacterium glutamicum
METLAAQARTLLEKWGVAPTHASFVESIAKAIPILSILLTLIVTVNGISSGNPVQPPALEQVRTDVVNKINYERNLKGLVSISPELELHTAAQTIAQRNADSDSEEKVPDPEGNLVVLQQNLPYANANADTIVDRFLNSPDHVKLLLANDYEAIGVGVAYKGDHAWIVVEFTVAPADSVESTE

SEQ ID NO: 1147 - DNA, 672 bp, Corynebacterium glutamicum
  CDS (101)..(649): FRXA02406
cactctgatagccttttctctgaaattgtaccgagcatttgattttgttcccctatcaatgctggttttggtgacaaaaactcggcggaaggaccaccgaatggaaacccttgcagcacaagcgcgcaccctgctagaaaaatggggcgtcgcgccgacgcacgcatctttcgtcgaatccattgcaaaggccatcccgattctgtcgatcctgctgacgctgattgtcaccgtgaatggaatttcaagcggaaatccggtccagccaccagcactggaacaggtacggaccgatgtagtgaacaagatcaactacgaacgcaacctaaagggcctcgtctcgatcagcccggagcttgaattacacacggcagcccaaacaattgcgcagcgaaatgcagactcagattccgaagaaaaagtaccggatccagagggaaccttggtggttctgcaacagaatctgccctatgcaaatgccaacgccgataccatcgttgatcggttcttaaactctcctgatcatgtcaaactactgcttgcaaacgattatgaagccatcggagttggtgtggcctacaagggtgatcatgcgtggatagtggtggagttcactgtagctcccgctgattccgtagaatcaacagagtgaataccaatccgtctgaattc

SEQ ID NO: 1148 - protein, 183 aa, Corynebacterium glutamicum
METLAAQARTLLEKWGVAPTHASFVESIAKAIPILSILLTLIVTVNGISSGNPVQPPALEQVRTDVVNKINYERNLKGLVSISPELELHTAAQTIAQRNADSDSEEKVPDPEGTLVVLQQNLPYANANADTIVDRFLNSPDHVKLLLANDYEAIGVGVAYKGDHAWIVVEFTVAPADSVESTE

SEQ ID NO: 1149 - DNA, 495 bp, Corynebacterium glutamicum
  CDS (101)..(472): RXN02407
ggataaaaatttggatgacatatcacctaagcttgcaatttctactggaatagcgcgactactctgcaccaacgcatagttgttgactaggctatttgtcatgaataggcaaaaccaacttcactacccgcaggaagtgaaggcagtggaaagtgtggaatcaagcttgaacatgtcgtcaccttctgcaccgcttgccacgccagatgttgagcttgatgtgcacacgttgtcgagcgaaaacctgccttggttgtgcatcgtgtgggatgatccggtcaatttgatgagctatgtcacctacgtttttcagactgtgttgggcttcagtaagaagagggccactgagctgatgatgcaggtgcacaccgaaggtaaagccgtggtgagttctggcgagaaggacaaagtggagggtgatgtgaagaaactccacaccgcagggctgtgggcgacaatgcagcaggcagggtaggggagaattttcatgcagca

SEQ ID NO: 1150 - protein, 124 aa, Corynebacterium glutamicum
MNRQNQLHYPQEVKAVESVESSLNMSSPSAPLATPDVELDVHTLSSENLPWLCIVWDDPVNLMSYVTYVFQTVLGFSKKRATELMMQVHTEGKAVVSSGEKDKVEGDVKKLHTAGLWATMQQAG

SEQ ID NO: 1151 - DNA, 406 bp, Corynebacterium glutamicum
  CDS (101)..(406): FRXA02407
ggataaaaatttggatgacatatcacctaagcttgcaatttctactggaatagcgcgactactctgcaccaacgcatagttgttgactaggctatttgtcatgaataggcaaaaccaacttcactacccgcaggaagtgaaggcagtggaaagtgtggaatcaagcttgaacatgtcgtcaccttctgcaccgcttgccacgccagatgttgagcttgatgtgcacacgttgtcgagcgaaaacctgccttggttgtgcatcgtgtgggatgatccggtcaatttgatgagctatgtcacctacgtttttcagactgtgttgggcttcagtaagaagagggccactgagctgatgatgcaggtgcacaccgaaggtaaagccgtggtgagttctggcgagaaggac

SEQ ID NO: 1152 - protein, 102 aa, Corynebacterium glutamicum
MNRQNQLHYPQEVKAVESVESSLNMSSPSAPLATPDVELDVHTLSSENLPWLCIVWDDPVNLMSYVTYVFQTVLGFSKKRATELMMQVHTEGKAVVSSGEKD

SEQ ID NO: 1153 - DNA, 1035 bp, Corynebacterium glutamicum
  CDS (101)..(1012): RXN02408
gtgatgtacgcggcggggaagccgccgaggaagaccgcgaaaacctcgtgcagtggcttgcctacaatcaagagtccttgctggaagcgatgatgaattaatgcttatcgacgtcgcgggcttccttttaggccacgtcacgaagggggatacgggttgctcagtggtcattgcacctaacggtgcatttgcgggcgtcgatgtccgtgggggaggcccaggcaccagggaaaccgaccttctagaaccacacaattctgtgcagcaagcacatgccgtggtgttgtgtggcggttcggcgttcgggttggctgctgccgatggagtgatgacagccctagaaaaccgcggtattggtttccctgtccgtcccgaagggcctatcgtgccaatcgttccaggcgctgtgatttttgatttgttggtgggcgatcccaaaaacaggcccacggcagctgatggggaacaagcagttgaaaacgctttcgctggtacacacaacggttcgggcagcgtcggtgcaggaacgggtgctacagcaggtcggctgcgtggcggttttggccaaagctcgcgccgggtcggaaagtacaccatcgcggcaggggtcgtggcgaatcctgttggggaagtcgtggacctaacaactggagctttgtttggtaggcccgaagtgatgggggtgggcgtcgataagctaaaaagcgcggcagagacgctgaacacgaccatcggcgtcgtggcaactgacgcgccggtgacaaaagcccaagcgaagcgcttggcgctggtggcccatgatggtttggcgagggcagtgcggccgtcgcattcaccgatggacggtgacacatttttcgccatgtcatcgggtgatggtagtggcgttaccccggttgagctggcggaattgtcggctcatgctgcagattgcgtacaggacgctatcatcgacgccatacttaccgcgagtccgggactcgggctcaaaagcttcagggaacttttaccatgagttacaacagcccgtataac

SEQ ID NO: 1154 - protein, 304 aa, Corynebacterium glutamicum
MLIDVAGFLLGHVTKGDTGCSVVIAPNGAFAGVDVRGGGPGTRETDLLEPHNSVQQAHAVVLCGGSAFGLAAADGVMTALENRGIGFPVRPEGPIVPIVPGAVIFDLLVGDPKNRPTAADGEQAVENAFAGTHNGSGSVGAGTGATAGRLRGGFGQSSRRVGKYTIAAGVVANPVGEVVDLTTGALFGRPEVMGVGVDKLKSAAETLNTTIGVVATDAPVTKAQAKRLALVAHDGLARAVRPSHSPMDGDTFFAMSSGDGSGVTPVELAELSAHAADCVQDAIIDAILTASPGLGLKSFRELLP

SEQ ID NO: 1155 - DNA, 928 bp, Corynebacterium glutamicum
  CDS (101)..(928): FRXA02408
gtgatgtacgcggcggggaagccgccgaggaagaccgcgaaaacctcgtgcagtggcttgcctacaatcaagagtccttgctggaagcgatgatgaattaatgcttatcgacgtcgcgggcttccttttaggccacgtcacgaagggggatacgggttgctcagtggtcattgcacctaacggtgcatttgcgggcgtcgatgtccgtgggggaggcccaggcaccagggaaaccgaccttctagaaccacacaattctgtgcagcaagcacatgccgtggtgttgtgtggcggttcggcgttcgggttggctgctgccgatggagtgatgacagccctagaaaaccgcggtattggtttccctgtccgtcccgaagggcctatcgtgccaatcgttccaggcgctgtgatttttgatttgttggtgggcgatcccaaaaacaggcccacggcagctgatggggaacaagcagttgaaaacgctttcgctggtacacacaacggttcgggcagcgtcggtgcaggaacgggtgctacagcaggtcggctgcgtggcggttttggccaaagctcgcgccgggtcggaaagtacaccatcgcggcaggggtcgtggcgaatcctgttggggaagtcgtggacctaacaactggagctttgtttggtaggcccgaagtgatgggggtgggcgtcgataagctaaaaagcgcggcagagacgctgaacacgaccatcggcgtcgtggcaactgacgcgccggtgacaaaagcccaagcgaagcgcttggcgctggtggcccatgatggtttggcgagggcagtgcggccgtcgcattcaccgatggacggtgacacatttttcgccatgtcatcgggtgatggtagtggcgttaccccggttgagctgggggaattgtcggctcatgctgca

SEQ ID NO: 1156 - protein, 276 aa, Corynebacterium glutamicum
MLIDVAGFLLGHVTKGDTGCSVVIAPNGAFAGVDVRGGGPGTRETDLLEPHNSVQQAHAVVLCGGSAFGLAAADGVMTALENRGIGFPVRPEGPIVPIVPGAVIFDLLVGDPKNRPTAADGEQAVENAFAGTHNGSGSVGAGTGATAGRLRGGFGQSSRRVGKYTIAAGVVANPVGEVVDLTTGALFGRPEVMGVGVDKLKSAAETLNTTIGVVATDAPVTKAQAKRLALVAHDGLARAVRPSHSPMDGDTFFAMSSGDGSGVTPVELGELSAHAA

SEQ ID NO: 1157 - DNA, 660 bp, Corynebacterium glutamicum
  CDS (101)..(637): RXN02409
gagttctggcgagaaggacaaagtggagggtgatgtgaagaaactccacaccgcagggctgtgggcgacaatgcagcaggcagggtaggggagaattttcatgcagcagtggaagaagaaaaaagggctgatgcgccaggctcgttacgcggtggtttttgagccgatggagcgggaagtgttgggtgatttgtcagctgcggtcagtgaggcgttgattcagcgtgcacagtctgtgccgaaggatcctctggcagagatgaccggcatgacaagtggacacaaagaagcaccaaccgatccggcgcttgcgcgtttgctccctgattttcagcacgagggcgatgaggaatacgacggcgataattctttcctccgttcactccatgaaggcgacatcacccgagcaaaactggaaaatctgcgcgtgattaacgatgcgctgggacccgacggaaatgttgcggtcaccgcctctgaggaggaagcgcacgcttggttggctgcgctcaatgacatccgcctgtacgttgcctccggtgatgtacgcggcggggaagccgccgaggaagaccgcgaaaacctcgtgcagtggcttgcctacaatcaagagtccttgctggaagcgatgatgaattaatgcttatcgacgtcgcgggc

SEQ ID NO: 1158 - protein, 179 aa, Corynebacterium glutamicum
MQQWKKKKGLMRQARYAVVFEPMEREVLGDLSAAVSEALIQRAQSVPKDPLAEMTGMTSGHKEAPTDPALARLLPDFQHEGDEEYDGDNSFLRSLHEGDITRAKLENLRVINDALGPDGNVAVTASEEEAHAWLAALNDIRLYVASGDVRGGEAAEEDRENLVQWLAYNQESLLEAMMN

SEQ ID NO: 1159 - DNA, 437 bp, Corynebacterium glutamicum
  CDS (1)..(414): FRXA02409
cgtgcacagtctgtgccgaaggatcctctggcagagatgaccggcatgacaagtggacacaaagaagcaccaaccgatccggcgcttgcgcgtttgctccctgattttcagcacgagggcgatgaggaatacgacggcgataattctttcctccgttcactccatgaaggcgacatcacccgagcaaaactggaaaatctgcgcgtgattaacgatgcgctgggacccgacggaaatgttgcggtcaccgcctctgaggaggaagcgcacgcttggttggctgcgctcaatgacatccgcctgtacgttgcctccggtgatgtacgcggcggggaagccgccgaggaagaccgcgaaaacctcgtgcagtggcttgcctacaatcaagagtccttgctggaagcgatgatgaattaatgcttatcgacgtcgcgggc

SEQ ID NO: 1160 - protein, 138 aa, Corynebacterium glutamicum
RAQSVPKDPLAEMTGMTSGHKEAPTDPALARLLPDFQHEGDEEYDGDNSFLRSLHEGDITRAKLENLRVINDALGPDGNVAVTASEEEAHAWLAALNDIRLYVASGDVRGGEAAEEDRENLVQWLAYNQESLLEAMMN

SEQ ID NO: 1161 - DNA, 1257 bp, Corynebacterium glutamicum
  CDS (101)..(1234): RXN02428
cgaaagatatgcataaagtgatgatgaaatagctttgtcgaaaggtttgctcccggtgcattcagttagcgtgaaggtgccatcatcacaagggttgatgatggccgcgacgttagatcttccagatacagatcccattgcctatgcaatgtttgcccactgtttcaccggctcacggttcacgccagccgccgcgcgagtcagtaaaacactcgcagaatccggcgtcgcctgcctgcgtttcgatttcccaggactgagccaatcagaaggtgacttctccaaaaccaccttcaactccaatgtggacgatatcgtggcggcctcgcagtggttgacggaacactactccgctccacagttgctcattggacactccttgggtggtgcagcatcactgaaagctgccaccaaaatctcctgcctcaaagcagtagcaacgataggtgcaccttttgatcctgcgcacgcagtcctgcactttgctgatcgcatatgtgatgtagatgatcaaggtgctgtcactctgcagctcggaggccgggatgtcaccatttcccgcgaattcctcgaagaccttgcagaggtcaaccccgaagatcacctccgcaggctccgcaaaccactgcttttactgcattcccccaccgaccaaaccgtcggcgtggacaacgcgcagctcatcttcagagtcactcgctaccctaaatccttgatgactttggacaaggcagatcacctgctcaccaaagatggcaccgcacagcgtgcagcccggatcatcgcgaactgggtcgagccctacctggttccagaaaacgtctgtgaggatcttccggagtttgtcgccgaagcctcaaccatcaaagccagcaaatacggcgcagccatccgcaccggtggtcacaatttcatcaccgaccgcgacaaatcccagggtggcaaaaacctcggcttcacccctacttccctgctggtttccgcgcttgctgctgcaaactctcaaacgatcaaacaagcagccatcgacaaccgcatcaaaggccttgacgatgtcaaagtgacgatctcccaggaacaatcagccgaccacggccagatcaaactccgccgaaagatctctttgatcggcaacctcagcgatgctgacagtgcttcacttcgggccgcatctaattcctgctcgattacccaactgctcgcgcagggaatcgtcatcgacgacgaggtgaactagcgtggattttgagttgggta

SEQ ID NO: 1162 - protein, 378 aa, Corynebacterium glutamicum
MAATLDLPDTDPIAYAMFAHCFTGSRFTPAAARVSKTLAESGVACLRFDFPGLSQSEGDFSKTTFNSNVDDIVAASQWLTEHYSAPQLLIGHSLGGAASLKAATKISCLKAVATIGAPFDPAHAVLHFADRICDVDDQGAVTLQLGGRDVTISREFLEDLAEVNPEDHLRRLRKPLLLLHSPTDQTVGVDNAQLIFRVTRYPKSLMTLDKADHLLTKDGTAQRAARIIANWVEPYLVPENVCEDLPEFVAEASTIKASKYGAAIRTGGHNFITDRDKSQGGKNLGFTPTSLLVSALAAANSQTIKQAAIDNRIKGLDDVKVTISQEQSADHGQIKLRRKISLIGNLSDADSASLRAASNSCSITQLLAQGIVIDDEVN

SEQ ID NO: 1163 - DNA, 1257 bp, Corynebacterium glutamicum; identical to SEQ ID NO: 1161
  CDS (101)..(1234): FRXA02428

SEQ ID NO: 1164 - protein, 378 aa, Corynebacterium glutamicum; identical to SEQ ID NO: 1162

SEQ ID NO: 1165 - DNA, 1365 bp, Corynebacterium glutamicum
  CDS (101)..(1342): RXN02454
ggcaagcgcctcccttaagcccgcgtaccggctaccccgaggcacgtaatgagtagggcagttctagccataatcagcagaaaaggtggagtgattcgccatgaaagagtccatgagcatcacctcgtcgacgtacgcgtcggcactgctgacactgccctggggtacacccctggaacagtggcccgataatctcatcgccgcgctgcccaggggtatttcccggcacatcgtgcgtttcgtggggatcaaccgtggcatcgtcgcggtcaaagaaattggtgcgcgtaccgcccaccacgagtacaagatgctgcgtgaactgcagcgccttggtgcccccagtgtgcgccccgtagccgtgatcaccggacgccatccggcagaggaagactacggggagctcaccgcagctttggtgaccgagcacttggagttttccctgccctatcgcgagatcttttctcggcacctcacggtcgtggaatcggagaagctcatccgcgccctgtccgtgctgttggtgcggatgcatctgctcaacttctactggggagatgtgtcactgtctaatactctctttcgtcgcgatgctgaaacctattccgcctatctcgtcgatgccgaaaccggggagttccagcccaacctctctgaatcacgcaggctttacgacgtcgacatcgcccgcgtcaacatcattggcgaactcatggacctacaggcgggtgaatgcctagataagtccatcgatgtcatcgccctaggaggccttgtcgaaagctcttatcttgaattgtggacggagctcaccgcggaggaatccgtcgatgccagtgaatattggcgcctctctgagagaattgaccggctcaatcaactgggctttgacgtaggggagctcaaggtcacgaaggacgattcgcggcaggttgtgcgcattcgccctgtagtggtggatccgggccactatcgtgcagagctattgagcttaaccgggctgagcgtcgaggaacaccaggcccaacgcctattgggctcgatccaggcctatcaggccgtcgaatgcggaccgcatgtaggtcttacccaagccgcgcatctctggatgacgaatgaatacgaaccgactatcgccgccgtccccgtggagatgttagacaagctggagccagcacaaatcttccacgaaatcgtcgaccaccgctggttcctcgcccaagaaaggggaggggctgtcaccctcccagaggccacggcatcctatcttgaatccgtgcttccggcccgccgcgacgaggctcgcctcctcagcacaaacccttcagacgaagacttgtcataacctctcgcgtgccccaacgg

SEQ ID NO: 1166 - protein, 414 aa, Corynebacterium glutamicum
MKESMSITSSTYASALLTLPWGTPLEQWPDNLIAALPRGISRHIVRFVGINRGIVAVKEIGARTAHHEYKMLRELQRLGAPSVRPVAVITGRHPAEEDYGELTAALVTEHLEFSLPYREIFSRHLTVVESEKLIRALSVLLVRMHLLNFYWGDVSLSNTLFRRDAETYSAYLVDAETGEFQPNLSESRRLYDVDIARVNIIGELMDLQAGECLDKSIDVIALGGLVESSYLELWTELTAEESVDASEYWRLSERIDRLNQLGFDVGELKVTKDDSRQVVRIRPVVVDPGHYRAELLSLTGLSVEEHQAQRLLGSIQAYQAVECGPHVGLTQAAHLWMTNEYEPTIAAVPVEMLDKLEPAQIFHEIVDHRWFLAQERGGAVTLPEATASYLESVLPARRDEARLLSTNPSDEDLS

SEQ ID NO: 1167 - DNA, 836 bp, Corynebacterium glutamicum
  CDS (1)..(813): FRXA02454
atgcatctgctcaacttctactggggagatgtgtcactgtctaatactctctttcgtcgcgatgctgaaacctattccgcctatctcgtcgatgccgaaaccggggagttccagcccaacctctctgaatcacgcaggctttacgacgtcgacatcgcccgcgtcaacatcattggcgaactcatggacctacaggcgggtgaatgcctagataagtccatcgatgtcatcgccctaggaggccttgtcgaaagctcttatcttgaattgtggacggagctcaccgcggaggaatccgtcgatgccagtgaatattggcgcctctctgagagaattgaccggctcaatcaactgggctttgacgtaggggagctcaaggtcacgaaggacgattcgcggcaggttgtgcgcattcgccctgtagtggtggatccgggccactatcgtgcagagctattgagcttaaccgggctgagcgtcgaggaacaccaggcccaacgcctattgggctcgatccaggcctatcaggccgtcgaatgcggaccgcatgtaggtcttacccaagccgcgcatctctggatgacgaatgaatacgaaccgactatcgccgccgtccccgtggagatgttagacaagctggagccagcacaaatcttccacgaaatcgtcgaccaccgctggttcctcgcccaagaaaggggaggggctgtcaccctcccagaggccacggcatcctatcttgaatccgtgcttccggcccgccgcgacgaggctcgcctcctcagcacaaacccttcagacgaagacttgtcataacctctcgcgtgccccaacgg

SEQ ID NO: 1168 - protein, 271 aa, Corynebacterium glutamicum
MHLLNFYWGDVSLSNTLFRRDAETYSAYLVDAETGEFQPNLSESRRLYDVDIARVNIIGELMDLQAGECLDKSIDVIALGGLVESSYLELWTELTAEESVDASEYWRLSERIDRLNQLGFDVGELKVTKDDSRQVVRIRPVVVDPGHYRAELLSLTGLSVEEHQAQRLLGSIQAYQAVECGPHVGLTQAAHLWMTNEYEPTIAAVPVEMLDKLEPAQIFHEIVDHRWFLAQERGGAVTLPEATASYLESVLPARRDEARLLSTNPSDEDLS

SEQ ID NO: 1169 - DNA, 1233 bp, Corynebacterium glutamicum
  CDS (101)..(1210): RXN02457
ctgtaaagccacgtgagctgttgcttagactttactctacccccgcgtgtccaccacatcagttagaacatatgtaccacttcaaatctagggggaaacaatgttctacttcaccgtcaataatccgcaggatcctttaagcaccgaaattgttgagactaatcgccgtgacctcgcattttggcatcgattacgccccaaagatgacgatgatttagccacagccatcaacaaaatatgcgtgcgcacaggcttatcccgcaaactgatcgccgcttgtttatttagcatctgcttcctgccgtacttacccaacttccacaaactcgtcgaaaagcttggtcatctcgacatggcgcgcatcaacgcgatcactaaagctggcgaaaaagtgccaagcgagaagagagagcttttcgacgcctacctcgtcgattacctgacgcctcgagcggaggctcagtgcttgccccaggcaagctcaatttccgcaatgatgcggaaatttatcgcacaacactgccccgacgacaaggcctcctcagccaccaatgatggctccatccgctaccgcagaaacaacaaaggcgggatcagtatcaccgtcgatgccaccgccagcgaagtaacagaaatcaaagctgccctggaacaaatgtccaaagataaggactgcacaccaggcacttccctactccacatcattcgtggcctgccgacaaaagtcgtactcaacacctacggcaccaaagacagccctgaatacttagaaggaggaacctggctgtcaaaggaacagtctgagttctggaaaacccgaaccacgtccagtcgggatatggacgccgcccacttctcttacaccaccgcctacgctccaacccgagaaatgcgcgtctacatcaaaggtctacgcaccacctgtagcgtccctggctgcagtgtagcggtcgaaaactgccaactggaccacatcatcccctggggtgaaggagggccgacaacaccgtggaatattcatcccctgtgtgtcttccaccacatccagaagactgaagggaggctccagtgctatccactaccggacggcaccgtcctattcctagtggatggaataccggtgttctccatccccgacgggcctttatctaaatcgaataaaacctgggggacaaagttcggcaaatacatggagcgtcgaatcgccgcctaatccagcaagccagcgtgatc

SEQ ID NO: 1170 - protein, 370 aa, Corynebacterium glutamicum
MFYFTVNNPQDPLSTEIVETNRRDLAFWHRLRPKDDDDLATAINKICVRTGLSRKLIAACLFSICFLPYLPNFHKLVEKLGHLDMARINAITKAGEKVPSEKRELFDAYLVDYLTPRAEAQCLPQASSISAMMRKFIAQHCPDDKASSATNDGSIRYRRNNKGGISITVDATASEVTEIKAALEQMSKDKDCTPGTSLLHIIRGLPTKVVLNTYGTKDSPEYLEGGTWLSKEQSEFWKTRTTSSRDMDAAHFSYTTAYAPTREMRVYIKGLRTTCSVPGCSVAVENCQLDHIIPWGEGGPTTPWNIHPLCVFHHIQKTEGRLQCYPLPDGTVLFLVDGIPVFSIPDGPLSKSNKTWGTKFGKYMERRIAA

SEQ ID NO: 1171 - DNA, 1233 bp, Corynebacterium glutamicum; identical to SEQ ID NO: 1169
  CDS (101)..(1210): FRXA02457

SEQ ID NO: 1172 - protein, 370 aa, Corynebacterium glutamicum; identical to SEQ ID NO: 1170

SEQ ID NO: 1173 - DNA, 627 bp, Corynebacterium glutamicum
  CDS (101)..(604): RXN02460
gcgccgtcgaagccggactcgtaggcgtctactaccagcaatttgaccgtgcagtcgtcgaaatcgtcggactgttcgggctagaaggagaattctaatcttgcgcgtctacatcccagcaacgttttccacactccgcggactcaatgaatcccgcgtcatcacagcacgctccggatacggtttcgcagtcaccccagcactccttgacttctacaccgacggtgacgaagaagaaatcgcacatgcagccttccaagacgccgcagaagcctccatccgactcctcgcaatcggcgacgaagaaacatttccctaccgcagagtcgtcgtctcagtagatgttgacgactccgtggtgacctaccagcctgaaaacggcgaatccgtagtcaaactcagcccagcgcacatcaacctcgacgacgtggcagcaatccacatcgacgttgaagcctccgaagcagacaccaaaaaagctatcgaagtcatcgacgaatccgacctcggcgaagaagacgccgaactcaccgtcggagacgcccaagacaacttcatggcctggtacgacccagaagagctccccttcctagtcgagctcctctagatcacatatcccacgcgtcg

SEQ ID NO: 1174 - protein, 168 aa, Corynebacterium glutamicum
LRVYIPATFSTLRGLNESRVITARSGYGFAVTPALLDFYTDGDEEEIAHAAFQDAAEASIRLLAIGDEETFPYRRVVVSVDVDDSVVTYQPENGESVVKLSPAHINLDDVAAIHIDVEASEADTKKAIEVIDESDLGEEDAELTVGDAQDNFMAWYDPEELPFLVELL

SEQ ID NO: 1175 - DNA, 627 bp, Corynebacterium glutamicum; identical to SEQ ID NO: 1173
  CDS (101)..(604): FRXA02460

SEQ ID NO: 1176 - protein, 168 aa, Corynebacterium glutamicum; identical to SEQ ID NO: 1174

SEQ ID NO: 1177 - DNA, 1323 bp, Corynebacterium glutamicum
  CDS (101)..(1300): RXN02464
actcgacatcccagaaggtgtcaccgaacgagtcggaccaccaaccaaagttctaggcggaacagccccacgaccaccacgccgcacccggaaataacttatggcagcaaagcttcaaccactcaaacgcaccaaaaaagacctcatcgcaaccggtgtcatcacagcactagcagtcattggcgtcggcacggtctgggcaaccgcaccaatacgaggatctgaactcacccccgccgacgaaccattcattggctcaaccacactggacgccatccccgaaacactcagcgaacattggcgagccaccgacaccttaacaaaccacaaacccctcatcaccggcggagtcatcttcaccgccgacggcaacaccattaagacctacacccccgacggcgccctcctgtggagctacgaacgcgacaaagaactctgcagcctctccgtaggattcgacgccgccgtcgccacctacaaaaccggaatcggatgtggcgacgtcaccgccatcaacgccaacgacggccaataccaagcaacacgcagcgcaatctccagcgaccacgtagcaccgatctcctcgaacgatcggatcggtgttctcgggacagaacgcttggagctttggcgatccgatctggtgcgaaccatcgaatacggcgatgtggaagctcctcaagaatctgggcaacaaccacatccggaatgctcgattacgtccgccatgacacgcaaagatctattggctatcaccgaggattgccctgacggatcttcttacttgaggttcatgggcacaacaccagacgattcccgaactcctgaaatcacccaagacatagaaataaccgatggcaggatcgttgccatcggtcaatcagtggctgcggtgtatacaaacgatccttcgcctcgaatcgtctcctacaacgatgatggtgaactagttggagaacaagcagtcgatgaggttgagttcccggatccgccgtttcaaagcgcgaccgctgatcttccacaccatatgagttggttcaacggagacagcctcgtactgttctctcccactcagctcaatgtacgacaaagcttcaatgatgctttaggaaccggcattgcgttgaacggaagtctcctctaccccaccgctgagggcatcacggtagctaattgggacaccggagaggtgcagcgcaccattccggtggaccgtgcgggctacgacggtgaagttgcgctcggcgttgtagggcaggtgatcgtcgaaaagcgtggctctgagatcgttgctctaggctagatctcgttgttagcccaaag

SEQ ID NO: 1178 - protein, 400 aa, Corynebacterium glutamicum
MAAKLQPLKRTKKDLIATGVITALAVIGVGTVWATAPIRGSELTPADEPFIGSTTLDAIPETLSEHWRATDTLTNHKPLITGGVIFTADGNTIKTYTPDGALLWSYERDKELCSLSVGFDAAVATYKTGIGCGDVTAINANDGQYQATRSAISSDHVAPISSNDRIGVLGTERLELWRSDLVRTIEYGDVEAPQESGQQPHPECSITSAMTRKDLLAITEDCPDGSSYLRFMGTTPDDSRTPEITQDIEITDGRIVAIGQSVAAVYTNDPSPRIVSYNDDGELVGEQAVDEVEFPDPPFQSATADLPHHMSWFNGDSLVLFSPTQLNVRQSFNDALGTGIALNGSLLYPTAEGITVANWDTGEVQRTIPVDRAGYDGEVALGVVGQVIVEKRGSEIVALG

SEQ ID NO: 1179 - DNA, 630 bp, Corynebacterium glutamicum
  CDS (101)..(607): FRXA02464
acaaccacatccggaatgctcgattacgtccgccatgacacgcaaagatctattggctatcaccgaggattgccctgacggatcttcttacttgaggttcatgggcacaacaccagacgattcccgaactcctgaaatcacccaagacatagaaataaccgatggcaggatcgttgccatcggtcaatcagtggctgcggtgtatacaaacgatccttcgcctcgaatcgtctcctacaacgatgatggtgaactagttggagaacaagcagtcgatgaggttgagttcccggatccgccgtttcaaagcgcgaccgctgatcttccacaccatatgagttggttcaacggagacagcctcgtactgttctctcccactcagctcaatgtacgacaaagcttcaatgatgctttaggaaccggcattgcgttgaacggaagtctcctctaccccaccgctgagggcatcacggtagctaattgggacaccggagaggtgcagcgcaccattccggtggaccgtgcgggctacgacggtgaagttgcgctcggcgttgtagggcaggtgatcgtcgaaaagcgtggctctgagatcgttgctctaggctagatctcgttgttagcccaaag

SEQ ID NO: 1180 - protein, 169 aa, Corynebacterium glutamicum
MGTTPDDSRTPEITQDIEITDGRIVAIGQSVAAVYTNDPSPRIVSYNDDGELVGEQAVDEVEFPDPPFQSATADLPHHMSWFNGDSLVLFSPTQLNVRQSFNDALGTGIALNGSLLYPTAEGITVANWDTGEVQRTIPVDRAGYDGEVALGVVGQVIVEKRGSEIVALG

SEQ ID NO: 1181 - DNA, 522 bp, Corynebacterium glutamicum
  CDS (101)..(499): RXN02465
ctggtgcaatataaaagttaaccaaccagtcatccaatatgtcgcctaagtagtcttcccaaagttaacagctagaatcatggccgtgacttctccgaacatgcctgcatcaattcgctggggcggcatcgtcgccctcattcaatccaccatcggattcggttacgcctttttccttatttacagggaagctacgggcgagacggatccaagcatcgtctacgaaaccgataacgccaacacgtgggttggctacggtaccgctgcattcttcatcattgtgttcggaacggttgttgcaggcgcaatcaacatgatgaaggggcatcgctggggacgcggagctgtcgtcatgctgaatattattttgttgccggctgcgtattacatgtttatcgaaggccgattctcctgggcgatcgtcacaggaatctcagctctcttcgttttgggcgcactgtttaataagcgcgccgtcctttgggctaacaacgagatctagcctagagcaacgatctcaga

SEQ ID NO: 1182 - protein, 133 aa, Corynebacterium glutamicum
MPASIRWGGIVALIQSTIGFGYAFFLIYREATGETDPSIVYETDNANTWVGYGTAAFFIIVFGTVVAGAINMMKGHRWGRGAVVMLNIILLPAAYYMFIEGRFSWAIVTGISALFVLGALFNKRAVLWANNEI

SEQ ID NO: 1183 - DNA, 522 bp, Corynebacterium glutamicum; identical to SEQ ID NO: 1181
  CDS (101)..(499): FRXA02465

SEQ ID NO: 1184 - protein, 133 aa, Corynebacterium glutamicum; identical to SEQ ID NO: 1182

SEQ ID NO: 1185 - DNA, 187 bp, Corynebacterium glutamicum
  CDS (101)..(187): RXN02466
cgaaccgcaaagcgttccgctgacggaactgccgcctggcggcagctacaccgaaaccggtgctggcactttccgccaggtcggcgctgctcttcctcgcgtgggcgaggggcaggaacaaacttttacgtacgtcattgagattgaggatggcgtcaacacggccgcttatggtggcgacgatgcg

SEQ ID NO: 1186 - protein, 29 aa, Corynebacterium glutamicum
VGEGQEQTFTYVIEIEDGVNTAAYGGDDA

SEQ ID NO: 1187 - DNA, 187 bp, Corynebacterium glutamicum; identical to SEQ ID NO: 1185
  CDS (101)..(187): FRXA02466

SEQ ID NO: 1188 - protein, 29 aa, Corynebacterium glutamicum
VGEGQEQTFTYVIEIEDGVNTAAYGGDDA

SEQ ID NO: 1189 - DNA, 294 bp, Corynebacterium glutamicum
  CDS (101)..(271): RXN02505
tcggaaagcaatccggaacattcaggttgtagacaatgtcatcagttcagttgaccgtcccattaagcgcactggtcgtttgcgtattccgggggtctttgtggctggcactcatgcgtatgtcaatgaaactctttcggaaaatgagttcagcatgtgccgaaagaatgaacctggtttggtcattgagctggagaacatcagcatcgatcgcattgtcatttccacaccagatgcccaccgctatgcggatgagctcatggcggctgtttagaactcagtttccgtcaataa

SEQ ID NO: 1190 - protein, 57 aa, Corynebacterium glutamicum
VAGTHAYVNETLSENEFSMCRKNEPGLVIELENISIDRIVISTPDAHRYADELMAAV

SEQ ID NO: 1191 - DNA, 294 bp, Corynebacterium glutamicum; identical to SEQ ID NO: 1189
  CDS (101)..(271): FRXA02505

SEQ ID NO: 1192 - protein, 57 aa, Corynebacterium glutamicum; identical to SEQ ID NO: 1190

SEQ ID NO: 1193 - DNA, 759 bp, Corynebacterium glutamicum
  CDS (101)..(736): RXN02510
cccgtcgatgaggcaatcgctgtgatttcttcctggattggtgaccgcatcaatgatcagccgagcgaggactccattgcagctcgcaggtagccctgagatggactcatctgacagccacgttggtcaggatgtatatgttgatcaaggtctaggggagcccgacagactggaacgtctgtgggcgccctaccggatgagctacatcaacactcgatctggcggtaagcaatcaactaccgccaagcgggaccccttcattgaggttcccaaaatgagtgatgaggacggcctgatcgttgcgcggggtgagctggtgtattgcgtactcaacttgtatccctacaacgctggacacatgatggtgatcccattccgtaaggaaaagaatctagaggatttgagcttggcagaatctgcggagttgatgctctttacccaaacggccatcaaggcgctgaagcaggtgtcaaaccctgatgctgtcaatgttggtttaaaccttggcaaagcatcgggtggctcagtgggagatcaccttcatgtccatgtggtgcctaggtggtcgggtgatgctaatttcatgactgtgattgacggtgtcaaagtgctaccgcagaccctgcgtcaaaccagggccatgcttgcgcaagcatggggcaccattgatggggcaccaggcactgtcgacccaacgctgacttcagcgatccgtaccgcagcaccgaaggagcactgatgctgggacttcatggacgt

SEQ ID NO: 1194 - protein, 212 aa, Corynebacterium glutamicum
MDSSDSHVGQDVYVDQGLGEPDRLERLWAPYRMSYINTRSGGKQSTTAKRDPFIEVPKMSDEDGLIVARGELVYCVLNLYPYNAGHMMVIPFRKEKNLEDLSLAESAELMLFTQTAIKALKQVSNPDAVNVGLNLGKASGGSVGDHLHVHVVPRWSGDANFMTVIDGVKVLPQTLRQTRAMLAQAWGTIDGAPGTVDPTLTSAIRTAAPKEH

SEQ ID NO: 1195 - DNA, 759 bp, Corynebacterium glutamicum; identical to SEQ ID NO: 1193
  CDS (101)..(736): FRXA02510

SEQ ID NO: 1196 - protein, 212 aa, Corynebacterium glutamicum; identical to SEQ ID NO: 1194

SEQ ID NO: 1197 - DNA, 1752 bp, Corynebacterium glutamicum
  CDS (101)..(1729): RXN02519
aaacagaaaatggtttcctcgggcacctcgtcccctacgccaatttctcgacactttgccgcgcatcggcaccgctggttccagatcagcgaccctccacgtggaagacgagcagagccctttaggggcaacgcttttcgacgtcgcgaccggcgcgagctccatcaacgaccgcgataccgacgcctcagggcttgagcctgaaaagattcgccgatttgcatggctgcgcctgatcggcaccatgggtgcgttaatgatcgcgtttggtgcgctgggcgcgggtgcacttccggtggtgaataatccgtatgtggatttccctggcggaaacttcatgagccgaatgctgcagacctcttccatgatcgtgctcatcggcgtgggatttttggtgctggcgtgggtgttaatggcaccgctggtgggtattccttttaaacgcagcggaaacagaacagccagcgtgagtttgtccatgctgcgccgcacatttggcgcctgggtagcgcccatcatgctcaccgccccactgtttactcaagacatttattcttatctggcacaaggctctgtgaccgcgcagggaatggatgcctacgccggtggaccgcttgaactattggggcccgataatcatctggcacggtccgtgccctttatttgggcccagtcgccctcgccctacggccctgttgcgctgagcatcgcggcgtcgataagcgttattactaatgacagcatcgttggaggcgtgctggcgcaccgtattgcgtcgctgctgggcgttgtggctgcaggctgggcgatcaccatgctggccaggcgctgtcgggtatctgaagaagcgtccttttacctgggcgtacttaatccgctgctgattctgcacctgatcggcggtattcacaacgaatccatcctgctgggatttttacttgttggcctggaactcggactgcgtggcaccgaccggattcaaacagggctgtgggggcctgcgtggacatatattgcactgagtggcgtattgatttcttgcgcaggcctggtcaaggtgaccggctttattgggctcggttttgtgggcatggccttggccagggcgtttcatgcacgtggacatcgacacgtcgttgcgatcggcgttgcaggcctcgttcaagtagcagccctggtgatcaccgtggttgttctcagtgtgattaccggaatcagtttggggtggatcacaggtcaaggtggcgctgcgacgatccgaagctggatgtctatgaccaccaacattggcgttatttctggattcatcggaatgaatttggggctaggcgaccacaccgcagccatgctcgttgtgacccgtgcagccggaatcgcggtagctgccgccttcatggttcgtatgttgtttgccacatatagaggtcacattcacgctgtgggcggactgggcgtggcgactttcgtcctcgttatcctcttccccgtggtgcatccgtggtacatgctgtgggctatcgtgccgctagcttcctgggcaaatagactgttcttccagctcggagtgattgcctactccactgccttcagtttctttgtgctgcctcgcgggcttgcacttccagtcggaactgtcttttccatctacttcggcgcagcgctcggattcagcattctcctattagttggatggtggagtttgaggcggaatccaacctttggtttacactgatcaactgtgactactgattt

SEQ ID NO: 1198 - protein, 543 aa, Corynebacterium glutamicum
VEDEQSPLGATLFDVATGASSINDRDTDASGLEPEKIRRFAWLRLIGTMGALMIAFGALGAGALPVVNNPYVDFPGGNFMSRMLQTSSMIVLIGVGFLVLAWVLMAPLVGIPFKRSGNRTASVSLSMLRRTFGAWVAPIMLTAPLFTQDIYSYLAQGSVTAQGMDAYAGGPLELLGPDNHLARSVPFIWAQSPSPYGPVALSIAASISVITNDSIVGGVLAHRIASLLGVVAAGWAITMLARRCRVSEEASFYLGVLNPLLILHLIGGIHNESILLGFLLVGLELGLRGTDRIQTGLWGPAWTYIALSGVLISCAGLVKVTGFIGLGFVGMALARAFHARGHRHVVAIGVAGLVQVAALVITVVVLSVITGISLGWITGQGGAATIRSWMSMTTNIGVISGFIGMNLGLGDHTAAMLVVTRAAGIAVAAAFMVRMLFATYRGHIHAVGGLGVATFVLVILFPVVHPWYMLWAIVPLASWANRLFFQLGVIAYSTAFSFFVLPRGLALPVGTVFSIYFGAALGFSILLLVGWWSLRRNPTFGLH

SEQ ID NO: 1199 - DNA, 1929 bp, Corynebacterium glutamicum
  CDS (101)..(1906): FRXA02519
tgttttaaaacttcattccaattaccgaaaatgaatataatttgagatttagctcacactatcccccttcgggtcaccaccagactctgatgcgaggtaaatgttctccgctcccttgcgtagaatgatgcgagtgacgaaggacgagcagattcaacccaattcgaacgcccctgaaaacagaaaatggtttcctcgggcacctcgtcccctacgccaatttctcgacactttgccgcgcatcggcaccgctggttccagatcagcgaccctccacgtggaagacgagcagagccctttaggggcaacgcttttcgacgtcgcgaccggcgcgagctccatcaacgaccgcgataccgacgcctcagggcttgagcctgaaaagattcgccgatttgcatggctgcgcctgatcggcaccatgggtgcgttaatgatcgcgtttggtgcgctgggcgcgggtgcacttccggtggtgaataatccgtatgtggatttccctggcggaaacttcatgagccgaatgctgcagacctcttccatgatcgtgctcatcggcgtgggatttttggtgctggcgtgggtgttaatggcaccgctggtgggtattccttttaaacgcagcggaaacagaacagccagcgtgagtttgtccatgctgcgccgcacatttggcgcctgggtagcgcccatcatgctcaccgccccactgtttactcaagacatttattcttatctggcacaaggctctgtgaccgcgcagggaatggatgcctacgccggtggaccgcttgaactattggggcccgataatcatctggcacggtccgtgccctttatttgggcccagtcgccctcgccctacggccctgttgcgctgagcatcgcggcgtcgataagcgttattactaatgacagcatcgttggaggcgtgctggcgcaccgtattgcgtcgctgctgggcgttgtggctgcaggctgggcgatcaccatgctggccaggcgctgtcgggtatctgaagaagcgtccttttacctgggcgtacttaatccgctgctgattctgcacctgatcggcggtattcacaacgaatccatcctgctgggatttttacttgttggcctggaactcggactgcgtggcaccgaccggattcaaacagggctgtgggggcctgcgtggacatatattgcactgagtggcgtattgatttcttgcgcaggcctggtcaaggtgaccggctttattgggctcggttttgtgggcatggccttggccagggcgtttcatgcacgtggacatcgacacgtcgttgcgatcggcgttgcaggcctcgttcaagtagcagccctggtgatcaccgtggttgttctcagtgtgattaccggaatcagtttggggtggatcacaggtcaaggtggcgctgcgacgatccgaagctggatgtctatgaccaccaacattggcgttatttctggattcatcggaatgaatttggggctaggcgaccacaccgcagccatgctcgttgtgacccgtgcagccggaatcgcggtagctgccgccttcatggttcgtatgttgtttgccacatatagaggtcacattcacgctgtgggcggactgggcgtggcgactttcgtcctcgttatcctcttccccgtggtgcatccgtggtacatgctgtgggctatcgtgccgctagcttcctgggcaaatagactgttcttccagctcggagtgattgcctactccactgccttcagtttctttgtgctgcctcgcgggcttgcacttccagtcggaactgtcttttccatctacttcggcgcagcgctcggattcagcattctcctattagttggatggtggagtttgaggcggaatccaacctttggtttacactgatcaactgtgactactgattt

SEQ ID NO: 1200 - protein, 602 aa, Corynebacterium glutamicum
MFSAPLRRMMRVTKDEQIQPNSNAPENRKWFPRAPRPLRQFLDTLPRIGTAGSRSATLHVEDEQSPLGATLFDVATGASSINDRDTDASGLEPEKIRRFAWLRLIGTMGALMIAFGALGAGALPVVNNPYVDFPGGNFMSRMLQTSSMIVLIGVGFLVLAWVLMAPLVGIPFKRSGNRTASVSLSMLRRTFGAWVAPIMLTAPLFTQDIYSYLAQGSVTAQGMDAYAGGPLELLGPDNHLARSVPFIWAQSPSPYGPVALSIAASISVITNDSIVGGVLAHRIASLLGVVAAGWAITMLARRCRVSEEASFYLGVLNPLLILHLIGGIHNESILLGFLLVGLELGLRGTDRIQTGLWGPAWTYIALSGVLISCAGLVKVTGFIGLGFVGMALARAFHARGHRHVVAIGVAGLVQVAALVITVVVLSVITGISLGWITGQGGAATIRSWMSMTTNIGVISGFIGMNLGLGDHTAAMLVVTRAAGIAVAAAFMVRMLFATYRGHIHAVGGLGVATFVLVILFPVVHPWYMLWAIVPLASWANRLFFQLGVIAYSTAFSFFVLPRGLALPVGTVFSIYFGAALGFSILLLVGWWSLRRNPTFGLH

SEQ ID NO: 1201 - DNA, 807 bp, Corynebacterium glutamicum
  CDS (101)..(784): RXN02520
tttgcgctggtaggggggaagggattggacacgggaatggaattagggaacacttgtgttgtctaaaggtgaaagctaaatcaagcaggaggtgacaccagtgggagatgttgtaaaaggcaacgacgcgcacaccggagacggtgatacgcgccgaaaaattcttctcatcctgttggaacgtgcaccggtgatcgcttcagatattgctgaacagcttcagctttcaactgtgggagtgcgcaggcacctagacaacttggttgaagaaaatctggcggaggcggcaaatccgcgccagaacccatatgagcccaaaatgcgcggtaggccagcaaaaacttatcggcttactgataaaggtcgctcaatcttcggccacgaatatgattcccttgctgcggcagctctagccactcttcgagaggtcggcggagatgatgcagtaaggcaatttgctagaaagcggatcgaaacaattgttgagggtattaccccagcagatgtcacagatcaatcaatcgaagatacagccaaatctttagttgaagcttttagtcggcatggttatgcagcaactgtcgatgccactcgaaacgggttgcaactctgccagcatcactgtccaatatctacagtcgccacggaatttccggaactgtgtgaggcagagcatcaagcagtctcagaacttttggggcagcacacgcaaccattggcaacaatcgcggacggccacggcatctgcacaacaaatattgcattgacacccatcaaacactcctgatgaaaggagcggatcatgac

SEQ ID NO: 1202 - protein, 228 aa, Corynebacterium glutamicum
VGDVVKGNDAHTGDGDTRRKILLILLERAPVIASDIAEQLQLSTVGVRRHLDNLVEENLAEAANPRQNPYEPKMRGRPAKTYRLTDKGRSIFGHEYDSLAAAALATLREVGGDDAVRQFARKRIETIVEGITPADVTDQSIEDTAKSLVEAFSRHGYAATVDATRNGLQLCQHHCPISTVATEFPELCEAEHQAVSELLGQHTQPLATIADGHGICTTNIALTPIKHS

SEQ ID NO: 1203 - DNA, 807 bp, Corynebacterium glutamicum; identical to SEQ ID NO: 1201
  CDS (101)..(784): FRXA02520

SEQ ID NO: 1204 - protein, 228 aa, Corynebacterium glutamicum; identical to SEQ ID NO: 1202

SEQ ID NO: 1205 - DNA, 927 bp, Corynebacterium glutamicum
  CDS (101)..(904): RXN02534
ttaccagtaatctatgcagatttactgtccgttggggatccgcgcctatcggaagttgcctacattataaaaactcagattcaggaatacacagaccatgatgaattcaccgaacgcggacattattttagtagttaacaagctgtccaagtttattgatatcgaaaatattatgctcgttggagcacgatgtagagacattcaccagcaaaaatatcgcgatcaaacagcgggtagaagaactaaggatgttgacttcgctttagctttagaaagctgggacgacttcaatctattaaagcaacaattctcaccgactggtaacgcatggcaaggaatcaccattggaaatattccagtagatctcgtgccattcggaaatattgaaaacccacccggtgaagtcttgtccagaaaaggtcatctacttaatgtcgctgggttcaaggaagtattcgagcaagctgagctatatcccctaaatgatgcgatagacattaagttgtctacagttcccggacttactgcgctaaagctacatgcatggctcgaccgtaaagaaaataacatcaaagatgcaagcgatctagcattaatcttgtcgtggtacgaagaggatgtagaaactttatggaatcgctattttgccctggaaaatcaaggatacataggtgaaccagaggcaatggcagctgaattactaggacttgacactggaagaatactcggccacaaggaaactcaagccctccttgatcgatttaatgaacagtctcctcctgagctaaaccaatttgctgaatcacttgaagcccctcctgaacacagtcacccattagaacggcgtcgtatccaggtcgaggcactgttaggtggacttagagattccctcggttacgatgaatagcttccaatcccgcattgttc

SEQ ID NO: 1206 - protein, 268 aa, Corynebacterium glutamicum
MNSPNADIILVVNKLSKFIDIENIMLVGARCRDIHQQKYRDQTAGRRTKDVDFALALESWDDFNLLKQQFSPTGNAWQGITIGNIPVDLVPFGNIENPPGEVLSRKGHLLNVAGFKEVFEQAELYPLNDAIDIKLSTVPGLTALKLHAWLDRKENNIKDASDLALILSWYEEDVETLWNRYFALENQGYIGEPEAMAAELLGLDTGRILGHKETQALLDRFNEQSPPELNQFAESLEAPPEHSHPLERRRIQVEALLGGLRDSLGYDE

SEQ ID NO: 1207 - DNA, 927 bp, Corynebacterium glutamicum; identical to SEQ ID NO: 1205
  CDS (101)..(904): FRXA02534

SEQ ID NO: 1208 - protein, 268 aa, Corynebacterium glutamicum; identical to SEQ ID NO: 1206

SEQ ID NO: 1209 - DNA, 585 bp, Corynebacterium glutamicum
  CDS (101)..(562): RXN02537
acctccatctcaacaatcatctttccgatatgcgcactgtcagcgagcagatgctcaacatagacgtcgatcttggccacacactgaataagttgcactgatgctcgccctcaaaagttcagaattagaaggcatagccacatcactcaccgccgtggcgggtgcgctccacgaatcaaacactgaccggttgcagtcctggcagcagctcgaaacgatgacctctgccagctcccttatccagggctttatcaagcttgtcgattacaaccgacccacagtgaatatcgtggaacaaatgcacaaaaccgcatccacgcttttcaacaccgctgatttcctacgcactttggaaggctatgttgatgtactggaaaaacaagccgataaatctataacgctcaccgtcatgcttcgatatattgccagcttgagtagccttttagacctcatgtgtgcacgcgagatcaacgcgttgtgcacagcgattactccagaaccattgaagcatctgggcgattttggcactctaccgcctcagcaatccacgagtttcatttggtgaatgccccaccagaaatccgt

SEQ ID NO: 1210 - protein, 154 aa, Corynebacterium glutamicum
MLALKSSELEGIATSLTAVAGALHESNTDRLQSWQQLETMTSASSLIQGFIKLVDYNRPTVNIVEQMHKTASTLFNTADFLRTLEGYVDVLEKQADKSITLTVMLRYIASLSSLLDLMCAREINALCTAITPEPLKHLGDFGTLPPQQSTSFIW

SEQ ID NO: 1211 - DNA, 585 bp, Corynebacterium glutamicum; identical to SEQ ID NO: 1209
  CDS (101)..(562): FRXA02537

SEQ ID NO: 1212 - protein, 154 aa, Corynebacterium glutamicum; identical to SEQ ID NO: 1210

SEQ ID NO: 1213 - DNA, 795 bp, Corynebacterium glutamicum
  CDS (101)..(772): RXN02538
gcgagatcaacgcgttgtgcacagcgattactccagaaccattgaagcatctgggcgattttggcactctaccgcctcagcaatccacgagtttcatttggtgaatgccccaccagaaatccgtgccttagccgaagcccatcccgatatgcagatcctagaagccggcgatggttcattggtagcatcgtttggggatattgatagggctacgaccgtgaccaccatcgtggcaggtgtgggttcctccaacccagaagggtggaatacatatgttgaccgtgcccgcacagtatctgcttccaccggttccgcaacggtgttgtggctgggatatcaagcacccgcttcgattcctgctgcggtatccggcgcggcagcgaatcgcgctgccgcggatctccagaggtttcaagcggcactacagtcccgcaatccccaccaaagaaaagtagtgatgggctacagctacggttccacagtggtgggaaaagctgcgtcttccggcgagctcagtgccgatgcgttggtattggttggcagtcccggcgcgggtgtctcgcactcttcccagcttggcgcacctgtgtatgcggtaacagggtctgctgatcccatcggttttgccggcacccaatatgacggcatccacggcactgatcccaccgctgccctattcggtgcaacagtgtgggattcgccctcaacgcattccggttattggaatgaccaggagttcctgggcaatgtggcggaggtggttcgcggcaaatagaaaagccgccgcacactgga

SEQ ID NO: 1214 - protein, 224 aa, Corynebacterium glutamicum
VNAPPEIRALAEAHPDMQILEAGDGSLVASFGDIDRATTVTTIVAGVGSSNPEGWNTYVDRARTVSASTGSATVLWLGYQAPASIPAAVSGAAANRAAADLQRFQAALQSRNPHQRKVVMGYSYGSTVVGKAASSGELSADALVLVGSPGAGVSHSSQLGAPVYAVTGSADPIGFAGTQYDGIHGTDPTAALFGATVWDSPSTHSGYWNDQEFLGNVAEVVRGK

SEQ ID NO: 1215 - DNA, 795 bp, Corynebacterium glutamicum; identical to SEQ ID NO: 1213
  CDS (101)..(772): FRXA02538

SEQ ID NO: 1216 - protein, 224 aa, Corynebacterium glutamicum; identical to SEQ ID NO: 1214

SEQ ID NO: 1217 - DNA, 726 bp, Corynebacterium glutamicum
  CDS (101)..(703): RXN02555
gttttatcgctatttaatacaggcctacccccactacccccattcagttcagggaatccccggatttaaaacaattaaaaaccctctagaatgagacattatgggcgaacaatttccaggcgataaaaacatccgagtcagcgacaccgaaagatcagcagcactagcagcactcggccagttctacgcagaaggtcgcctctccctagaagaaaccgacgaccgctgcgaagccgtcgccgacgccaaaacccgcggcgacctcaacgccatcttctacgatctgcccaaccaacaaatcgcagtcgtcgaccgctccgaacaaacctacacagccaccgaagttgccgaactccaccgcaaaggcgcacgcccacgcgccggaatcctcggactcaccacagttttagccatcaccggtaccgctgctttcgccagcaccacagcttttgcaacagtacttttagccctgattccgatcgtgttcatcatgctgtacgtgatgaaaattggtcctgaatcctggcacgcaccaacacctcgccaacttcagcgaaagcgcatgatcgaactgcgtgaaaaggaaaaactccgcgacatggagctcaaagcccagcgcaaggaacgcacccacgcattaaccaaccgcgcgttggatgctgctgaaactgctttcaacaccaagccctggaagaagaacaaatagggcttttgaagtgtgtcgcg

SEQ ID NO: 1218 - protein, 201 aa, Corynebacterium glutamicum
MGEQFPGDKNIRVSDTERSAALAALGQFYAEGRLSLEETDDRCEAVADAKTRGDLNAIFYDLPNQQIAVVDRSEQTYTATEVAELHRKGARPRAGILGLTTVLAITGTAAFASTTAFATVLLALIPIVFIMLYVMKIGPESWHAPTPRQLQRKRMIELREKEKLRDMELKAQRKERTHALTNRALDAAETAFNTKPWKKNK

SEQ ID NO: 1219 - DNA, 726 bp, Corynebacterium glutamicum; identical to SEQ ID NO: 1217
  CDS (101)..(703): FRXA02555

SEQ ID NO: 1220 - protein, 201 aa, Corynebacterium glutamicum; identical to SEQ ID NO: 1218

SEQ ID NO: 1221 - DNA, 1125 bp, Corynebacterium glutamicum
  CDS (101)..(1102): RXN02564
acaccacagtgaagcggtgacgtgaatcacccaagcacttaggcatcaaacattcaagagcttgttgtccaaaagtccgaccgagagggattcccccaaaatggccgaagtaggagcagaacccgcagggtctgcacaatccaaaactaaacaatttgttgtaggtaccgcagcggtggtcatcactgcaatcgctgcgtttttctccatccagtctgcatccggtggcgaggatattcgttccaacatgacgctgattgctcctgcagctgcaggtggaggttgggatactttccaacgtgagcagcagcagtctatgcgcgtgaataagatcgtgaacaatattcaggtggtcaacatccctggagctggtggaaccattgcacttggcaaactgtctaccatgactgcaccgaacaccttgatggtgggtggaacggggcatatcgcagcacaaattcaattcgatacccctgcgaaaatccaggatgtcaccccaattgctcgtgtggtggaagagttcgacatcatcaccgtgccagcggattctccatacaacacccttgaagagctcattgaaggttggaaggcagatccagcaggagtgtcctggaccggtggtggttcctttgaccagcttgttatgacagaaattgcactgtctgcaggtatagatcctaagcaaaccacctttattccttctgatggtggtggcgaagcgattcaggcgctactgaacggaaccgcaaaggcatcaactggtggttttgctgatatgtatccgcaggtagaagccggtcgattgaaggttttgggaattgctgcagaagaacgccttccaggttctgacattccaacgctagtggaacaaggctatgacgtgaccttgaccaactggcgtgccatgttcgctcctcctggtttgagcgatgatcaaattgcggaacttcgagcaatcgttgcggagtctgtggagactgctgaatggcagtccgcggtggaacgaaactactggatgaacgcctcacttgaaggcgaagaactcgaccagtttgttgaagatgaaattgaccgaattgatcagctattcaaggagatgggctagtgaacgtcactgaacaatcc

SEQ ID NO: 1222 - protein, 334 aa, Corynebacterium glutamicum
MAEVGAEPAGSAQSKTKQFVVGTAAVVITAIAAFFSIQSASGGEDIRSNMTLIAPAAAGGGWDTFQREQQQSMRVNKIVNNIQVVNIPGAGGTIALGKLSTMTAPNTLMVGGTGHIAAQIQFDTPAKIQDVTPIARVVEEFDIITVPADSPYNTLEELIEGWKADPAGVSWTGGGSFDQLVMTEIALSAGIDPKQTTFIPSDGGGEAIQALLNGTAKASTGGFADMYPQVEAGRLKVLGIAAEERLPGSDIPTLVEQGYDVTLTNWRAMFAPPGLSDDQIAELRAIVAESVETAEWQSAVERNYWMNASLEGEELDQFVEDEIDRIDQLFKEMG

SEQ ID NO: 1223 - DNA, 775 bp, Corynebacterium glutamicum
  CDS (101)..(775): FRXA02564
acaccacagtgaagcggtgacgtgaatcacccaagcacttaggcatcaaacattcaagagcttgttgtccaaaagtccgaccgagagggattcccccaaaatggccgaagtaggagcagaacccgcagggtctgcacaatccaaaactaaacaatttgttgtaggtaccgcagcggtggtcatcactgcaatcgctgcgtttttctccatccagtctgcatccggtggcgaggatattcgttccaacatgacgctgattgctcctgcagctgcaggtggaggttgggatactttccaacgtgagcagcagcagtctatgcgcgtgaataagatcgtgaacaatattcaggtggtcaacatccctggagctggtggaaccattgcacttggcaaactgtctaccatgactgcaccgaacaccttgatggtgggtggaacggggcatatcgcagcacaaattcaattcgatacccctgcgaaaatccaggatgtcaccccaattgctcgtgtggtggaagagttcgacatcatcaccgtgccagcggattctccatacaacacccttgaagagctcattgaaggttggaaggcagatccagcaggagtgtcctggaccggtggtggttcctttgaccagcttgttatgacagaaattgcactgtctgcaggtatagatcctaagcaaaccacctttattccttctgatggtggtggcgaagcgattcaggcgctactgaacggaaccgcaaaggcatcaactggtggttttgctgat

SEQ ID NO: 1224 - protein, 225 aa, Corynebacterium glutamicum
MAEVGAEPAGSAQSKTKQFVVGTAAVVITAIAAFFSIQSASGGEDIRSNMTLIAPAAAGGGWDTFQREQQQSMRVNKIVNNIQVVNIPGAGGTIALGKLSTMTAPNTLMVGGTGHIAAQIQFDTPAKIQDVTPIARVVEEFDIITVPADSPYNTLEELIEGWKADPAGVSWTGGGSFDQLVMTEIALSAGIDPKQTTFIPSDGGGEAIQALLNGTAKASTGGFAD

SEQ ID NO: 1225 - DNA, 1753 bp, Corynebacterium glutamicum
  CDS (101)..(1753): RXN02568
ccagctacgatatggaatttcaccaaatgcgaactaccctaaataccaaagacagacagtgacagccccttcgagaatgcagcaagagacgacacctcctatggacggcacctcgccacagaacaaaatttccaccactcccccagcgccaggaaatgctattcctgcacctggaggcgccattcctacaccagcgaaaactgagcaggacgcagtacctccaactgtggcggcgaaactacccgtacctggaagttctattccagcacccggtagagcattgccaactccagtggctccgggaggttccgtcccagctccgagagcgtccgcacctgcggttcctaacgttcctgcagctcccggcgctgctgttccagctccgggaatctcgatcccggcagcacctagtgccccaggcagtgcaattccaacaccaggcacagcaatccctgtgcctggaagtgcaactcctgtcccagcacctggggttagtgcacctggcgcaagcgttccaagcattccagtaccaggatctgtcaccccacctgcaccaggaatttccgcacctggcggtgcacttccgactcctggcagtgcgcccccaacacctggcggtgcccttccgactccaggtgaggcacttcccgttcccggagcacctggtgcacccggagcatccggaatcccaagtcctggccttccaaccccaggtgtcccaactcccggagcttccttaccagtcccaggagcaccagacgcacctggaaccccaagcattcccgcagctcccggcattcaagcaccaggaattccagcagcaccaggagcccctgcccaagctgctgctcacgcaaagccagtattccaagatgcagagaaacgacctcgcacagatgaagctggaaatgcgaagaaggaactgccgctgagagttcggttggcgcagccaattacacgtaagcagtgggcaatgactcttggtgtcctggttctcggagcaattgtcgtggctgcaatcgcggtggtccttgccaaatgggcgtttaccacggagtggttgcaggacttcgtcgagaagtatccgggtaaatatgacaaccccgaaggtgcgccagtaggaattccaacgtggctgagttggcagcacttcttcaacatgttcttcatggtgttgattatcaagacgggcattgagatcaatagaacccgcaggccaaagggttattggacgccgaaaaagggtggcaagaagatctccttgacgttgtggatccacctggttttggatttgttgtggatcatcaacggtgcggtgttcatcattttgttgttcgcgacgggtcagtggatgcgcattgttccaaccagttgggatgtgttcccgaacgcgctgagtgctggtttgcagtatgtgtcgttggattggccgactgagaatggttgggcgaattacaacagtttgcaggagctgacgtacttcttcactgtctttattgcggcaccgttgtcgattgtgtctggtttccggatgtcgagttactggcctaagaacaatgcgacgatgaataagttgatccccatcgggtttgctcgtgcgctgcacatgccagtgatggtgtattacatcgtgttcatttgtatccacgtgttcttggtgttggcgaccggcgcgttgcgcaatttcaaccatatgtatgcaggtcaagacgttgtgaactgggttggttttggttggttcgtggcgtcgttg

SEQ ID NO: 1226 - protein, 551 aa, Corynebacterium glutamicum
MDGTSPQNKISTTPPAPGNAIPAPGGAIPTPAKTEQDAVPPTVAAKLPVPGSSIPAPGRALPTPVAPGGSVPAPRASAPAVPNVPAAPGAAVPAPGISIPAAPSAPGSAIPTPGTAIPVPGSATPVPAPGVSAPGASVPSIPVPGSVTPPAPGISAPGGALPTPGSAPPTPGGALPTPGEALPVPGAPGAPGASGIPSPGLPTPGVPTPGASLPVPGAPDAPGTPSIPAAPGIQAPGIPAAPGAPAQAAAHAKPVFQDAEKRPRTDEAGNAKKELPLRVRLAQPITRKQWAMTLGVLVLGAIVVAAIAVVLAKWAFTTEWLQDFVEKYPGKYDNPEGAPVGIPTWLSWQHFFNMFFMVLIIKTGIEINRTRRPKGYWTPKKGGKKISLTLWIHLVLDLLWIINGAVFIILLFATGQWMRIVPTSWDVFPNALSAGLQYVSLDWPTENGWANYNSLQELTYFFTVFIAAPLSIVSGFRMSSYWPKNNATMNKLIPIGFARALHMPVMVYYIVFICIHVFLVLATGALRNFNHMYAGQDVVNWVGFGWFVASL

SEQ ID NO: 1227 - DNA, 1359 bp, Corynebacterium glutamicum
  CDS (1)..(1359): FRXA02568
atcccggcagcacctagtgccccaggcagtgcaattccaacaccaggcacagcaatccctgtgcctggaagtgcaactcctgtcccagcacctggggttagtgcacctggcgcaagcgttccaagcattccagtaccaggatctgtcaccccacctgcaccaggaatttccgcacctggcggtgcacttccgactcctggcagtgcgcccccaacacctggcggtgcccttccgactccaggtgaggcacttcccgttcccggagcacctggtgcacccggagcatccggaatcccaagtcctggccttccaaccccaggtgtcccaactcccggagcttccttaccagtcccaggagcaccagacgcacctggaaccccaagcattcccgcagctcccggcattcaagcaccaggaattccagcagcaccaggagcccctgcccaagctgctgctcacgcaaagccagtattccaagatgcagagaaacgacctcgcacagatgaagctggaaatgcgaagaaggaactgccgctgagagttcggttggcgcagccaattacacgtaagcagtgggcaatgactcttggtgtcctggttctcggagcaattgtcgtggctgcaatcgcggtggtccttgccaaatgggcgtttaccacggagtggttgcaggacttcgtcgagaagtatccgggtaaatatgacaaccccgaaggtgcgccagtaggaattccaacgtggctgagttggcagcacttcttcaacatgttcttcatggtgttgattatcaagacgggcattgagatcaatagaacccgcaggccaaagggttattggacgccgaaaaagggtggcaagaagatctccttgacgttgtggatccacctggttttggatttgttgtggatcatcaacggtgcggtgttcatcattttgttgttcgcgacgggtcagtggatgcgcattgttccaaccagttgggatgtgttcccgaacgcgctgagtgctggtttgcagtatgtgtcgttggattggccgactgagaatggttgggcgaattacaacagtttgcaggagctgacgtacttcttcactgtctttattgcggcaccgttgtcgattgtgtctggtttccggatgtcgagttactggcctaagaacaatgcgacgatgaataagttgatccccatcgggtttgctcgtgcgctgcacatgccagtgatggtgtattacatcgtgttcatttgtatccacgtgttcttggtgttggcgaccggcgcgttgcgcaatttcaaccatatgtatgcaggtcaagacgttgtgaactgggttggttttggttggttcgtggcgtcgttg

SEQ ID NO: 1228 - protein, 453 aa, Corynebacterium glutamicum
IPAAPSAPGSAIPTPGTAIPVPGSATPVPAPGVSAPGASVPSIPVPGSVTPPAPGISAPGGALPTPGSAPPTPGGALPTPGEALPVPGAPGAPGASGIPSPGLPTPGVPTPGASLPVPGAPDAPGTPSIPAAPGIQAPGIPAAPGAPAQAAAHAKPVFQDAEKRPRTDEAGNAKKELPLRVRLAQPITRKQWAMTLGVLVLGAIVVAAIAVVLAKWAFTTEWLQDFVEKYPGKYDNPEGAPVGIPTWLSWQHFFNMFFMVLIIKTGIEINRTRRPKGYWTPKKGGKKISLTLWIHLVLDLLWIINGAVFIILLFATGQWMRIVPTSWDVFPNALSAGLQYVSLDWPTENGWANYNSLQELTYFFTVFIAAPLSIVSGFRMSSYWPKNNATMNKLIPIGFARALHMPVMVYYIVFICIHVFLVLATGALRNFNHMYAGQDVVNWVGFGWFVASL

SEQ ID NO: 1229 - DNA, 720 bp, Corynebacterium glutamicum
  CDS (101)..(697): RXN02593
gcgttcacttccgccaccttgaggatgagtggtatcacgccagcacaacaaaaggatcttcatagggttattcagtctagctgcttttaaacaagccataatggaagccatggccacaacgatcaccgttttctctcccacccactcccccgcacaaatccgcgaaaccatcctcagcgccgcgaaagaagacgacgtggacttcctcggagtcccctttacccaccccagaaacgtcaccatcgaagtcgacgacgaactgatcaacgactgcttaggctggctcgacgacgtggcactcgcctccggcctgggcatccaatacaacgacgaagtgctccgctacggcgacgaagacatttcctttaccgtccaaaccaaaaatgacgatgacgcccgcatcggcgcctcccgccttggactcgagcaccagttgaacgtcattgccgggggctctggagattccggggattccggggattatttgaagattgcacacttcgacctagacaaccccgccgacgagtcctcctacatcttcgcgcgcagcctcgcagaagtagacggctggaccctagaattcggcgtcgcaggagtaaaaaacaccaccattgtttcctccatcgacgatgccatcaccaccattttgcgatggatgaacggcgaagacatccgcgacctcaactggacccgcgcataaatggcctcatttccggagct

SEQ ID NO: 1230 - protein, 199 aa, Corynebacterium glutamicum
MEAMATTITVFSPTHSPAQIRETILSAAKEDDVDFLGVPFTHPRNVTIEVDDELINDCLGWLDDVALASGLGIQYNDEVLRYGDEDISFTVQTKNDDDARIGASRLGLEHQLNVIAGGSGDSGDSGDYLKIAHFDLDNPADESSYIFARSLAEVDGWTLEFGVAGVKNTTIVSSIDDAITTILRWMNGEDIRDLNWTRA

SEQ ID NO: 1231 - DNA, 336 bp, Corynebacterium glutamicum
  CDS (101)..(313): FRXA02593
tgacgatgacgcccgcatcggcgcctcccgccttggactctagcaccagttgaacgtcattgccgggggctctggagattccggggattccggggattatttgaagattgcacacttcgacctagacaaccccgccgacgagtcctcctacatcttcgcgcgcagcctcgcagaagtagacggctggaccctagaattcggcgtcgcaggagtaaaaaacaccaccattgtttcctccatcgacgatgccatcaccaccattttgcgatggatgaacggcgaagacatccgcgacctcaactggacccgcgcataaatggcctcatttccggagct

SEQ ID NO: 1232 - protein, 71 aa, Corynebacterium glutamicum
LKIAHFDLDNPADESSYIFARSLAEVDGWTLEFGVAGVKNTTIVSSIDDAITTILRWMNGEDIRDLNWTRA

SEQ ID NO: 1233 - DNA, 447 bp, Corynebacterium glutamicum
  CDS (101)..(424): FRXA02594
gcgttcacttccgccaccttgaggatgagtggtatcacgccagcacaacaaaaggatcttcatagggttattcagtctagctgcttttaaacaagccataatggaagccatggccacaacgatcaccgttttctctcccacccactcccccgcacaaatccgcgaaaccatcctcagcgccgcgaaagaagacgacgtggacttcctcggagtcccctttacccaccccagaaacgtcaccatcgaagtcgacgacgaactgatcaacgactgcttaggctggctcgacgacgtggcactcgcctccggcctgggcatccaatacaacgacgaagtgctccgctacggcgacgaagacatttcctttaccgtccaaaccaaaaatgacgatgacgcccgcatcggcgcctcccgccttggactctagcaccagttgaacgtcattgc

SEQ ID NO: 1234 - protein, 108 aa, Corynebacterium glutamicum
MEAMATTITVFSPTHSPAQIRETILSAAKEDDVDFLGVPFTHPRNVTIEVDDELINDCLGWLDDVALASGLGIQYNDEVLRYGDEDISFTVQTKNDDDARIGASRLGL

SEQ ID NO: 1235 - DNA, 1494 bp, Corynebacterium glutamicum
  CDS (101)..(1471): RXN02606
agggcgcggatcacttcggatctgtggataacttttaaggcccttgttttccccttgaagcttcggttgtgtggaaaacagaaaaggaggggaaaacaaaatgcaagaaatccacaccatcatgaaacacatggacgcgctcatcgccgacccgtccgccgccgcattcaaagcaacactccccttcgccgaactcctcgaaaagctccacaacaaaaaagcgcttttcgacgccgccctcgccaaatccgccgagcgcgccgatgccggacgcatcatcggaaaaacctcccacatcgatgccctcgcgtaccttctcgacatctccaaatccgaagcattccgacgcacaaaacgcgccgaagaacactacggcaacccaagcccggaacccagttcagaagaactcgcgaaagaaacccccgaagagaagctagccagagaagaaaaagagaaacaagacctagccgaacaagcagaagccaaccgcatcgcccgcgaacacggcatctccgccgaaaaacaagacaccatccgctacgaactagaaaaactcaacgacaacacatccctatcccgagcctcactccgcaaactagcaatgcaggaagccaccagccgaacccccgaagacctacgcaactggacccgcaacaaagttatccgcataaaccccaccgccaaagacccactcgccgcagtaaagaaacgctccttaagcatcggacgccaagaccacgacggcggagccaaagcatccctctatttagatgccaaaggtctagccctgctcaaatcactgatgtctaaagccaagccggggcatttgcttgaagactctttggcggaggataaacgtacgaaaccgcaacgccaatacgatgccttcgccgacatcctccaccgcgcacacagcgatctcctccccgcacgatccggagtgggcaccatcctcgtctccctctccgccaaagacgtaacaaacctcaaagcatcgggccccgaccaccgctaccccaccagcaccggcataaaactcacaccgcttgagatcctgcgactcggtgcagccaaatatgacttcgtgaccgtcctcgactccgaatccggccgtccgctgcacctggcacgcactcaacgcaccgccagcctgtatcaacgcctagccctcttcgcctccgaactcgtctgcacccgcgaaggctgcgactcccccttcgaagacaacgaaatacaccacatcagatcctggctagacggcggccccacagacatagaaaacatcaccaacatctgcccccacgaccacggaaacaacaacgaccaacgcgacggcaaagacaacatggggcacatgaacatagatcccacaaccgggcgcgtcggatatcaacccgccgaccgccgaaaacccatgcggtttaacaacaccgcagccgcagcagaatcaggaggagcacaggccaggacctaagtttttagcgcgccaaaaag

SEQ ID NO: 1236 - protein, 457 aa, Corynebacterium glutamicum
MQEIHTIMKHMDALIADPSAAAFKATLPFAELLEKLHNKKALFDAALAKSAERADAGRIIGKTSHIDALAYLLDISKSEAFRRTKRAEEHYGNPSPEPSSEELAKETPEEKLAREEKEKQDLAEQAEANRIAREHGISAEKQDTIRYELEKLNDNTSLSRASLRKLAMQEATSRTPEDLRNWTRNKVIRINPTAKDPLAAVKKRSLSIGRQDHDGGAKASLYLDAKGLALLKSLMSKAKPGHLLEDSLAEDKRTKPQRQYDAFADILHRAHSDLLPARSGVGTILVSLSAKDVTNLKASGPDHRYPTSTGIKLTPLEILRLGAAKYDFVTVLDSESGRPLHLARTQRTASLYQRLALFASELVCTREGCDSPFEDNEIHHIRSWLDGGPTDIENITNICPHDHGNNNDQRDGKDNMGHMNIDPTTGRVGYQPADRRKPMRFNNTAAAAESGGAQART

SEQ ID NO: 1237 - DNA, 1494 bp, Corynebacterium glutamicum; identical to SEQ ID NO: 1235
  CDS (101)..(1471): FRXA02606

SEQ ID NO: 1238 - protein, 457 aa, Corynebacterium glutamicum; identical to SEQ ID NO: 1236

SEQ ID NO: 1239 - DNA, 1050 bp, Corynebacterium glutamicum
  CDS (101)..(1027): RXN02610
ccagctcatcgtgcagggacgcaccagcgtgaaggaagatcaagcagcggaaatttctacgctgctgaaggaatctgcggatcggacgtattgttaaccgatgaggaaaaccatcaccgttattgctgtattgatcgtcctcgccttaatcggcgtgggcatcgtgcagtatgtgaacacatccgatgactcagatttcattggccagcctggcgagccaaccggtaccgaaaccacggaaccaccggttcaacctgattggtgccctgcggtagaagtcattgccgcgccgggtacgtgggagtcggctgctaatgatgatccgatcaacccgaccgctaatccgctgtcattcatgttgagcatcactcagccactgcaggagcgttattctgcggatgacgtcaaggtgtggacgctgccgtacactgcgcagttccgcaacatcaactcgcaaaatgagatgtcctatgatgattcgcgcaatgaaggcaccgcgaagatgaatgaggaactgatcaacactcacaatgagtgccctgccacggagttcatcatcgttggtttctcccagggtgcggtcattgcgggcgatgtggctgctcagatcggttcagagcaaggtgttattccagctgacagcgtcaggggtgtcgccctgatcgctgacggtcgccgggagcctggtgtgggccagttcccaggcacgtttgtggatggcatcggcgcggaggttactctgcagcctttgaacttgctggtgcagccgattgttccgggcgcaaccatgcgtggcgggcgcgcgggcggtttcggtgtgctcaacgaccgggtgcaggatatttgtgctccaaatgatgcgatctgtgatgctccggtgaatgtcggcaacgcccttgatcgtgcgttggccatggtctccgccaacggtgtgcacgcgctctacgccaccaatccggatgttttcccaggcacaaccaccaatgcgtgggttgtggattgggcgaccaacctcatcgacaacggataaagctttttcgcttttcgacg

SEQ ID NO: 1240 - protein, 309 aa, Corynebacterium glutamicum
MRKTITVIAVLIVLALIGVGIVQYVNTSDDSDFIGQPGEPTGTETTEPPVQPDWCPAVEVIAAPGTWESAANDDPINPTANPLSFMLSITQPLQERYSADDVKVWTLPYTAQFRNINSQNEMSYDDSRNEGTAKMNEELINTHNECPATEFIIVGFSQGAVIAGDVAAQIGSEQGVIPADSVRGVALIADGRREPGVGQFPGTFVDGIGAEVTLQPLNLLVQPIVPGATMRGGRAGGFGVLNDRVQDICAPNDAICDAPVNVGNALDRALAMVSANGVHALYATNPDVFPGTTTNAWVVDWATNLIDNG

SEQ ID NO: 1241 - DNA, 1050 bp, Corynebacterium glutamicum; identical to SEQ ID NO: 1239
  CDS (101)..(1027): FRXA02610

SEQ ID NO: 1242 - protein, 309 aa, Corynebacterium glutamicum; identical to SEQ ID NO: 1240

SEQ ID NO: 1243 - DNA, 1419 bp, Corynebacterium glutamicum
  CDS (101)..(1396): RXN02624
acccggtcagatccgacgtcgccggccaaaaccgcaagcacctgcgcaaacgccacagaaggcagctcagcaatcaaagttgctgcgtttccttccaaccgtgctgattccgcatggcgtggcggtgcttttggttattattctcgccgtagcctccctaatgttcaccaattcttcaatggtgaatctttcggcaacgattgcacagctgtggctttccctaaatctcggtgcggtggacggcagtggggaagtgatctcagtactgcccacgcttcccggctttatattcctctgggccatcgccgcgcgcatccaccgcgcagtcaaagatcgtgtcagcatcgccgacttaggcgtcctcgcagcactcgtcctcggcatcccgcttgcgctcaccgccatcgcagcgttcatgcttttcgacgcctccagcgtcctcaacgtcgaggtcccgccaatcacgcgcctcctacgcgtgatgttgttccacctcagcgccctcttcctcggcatggggccacgcctgtggcaggcgttggcgcgccgctacggtgctccagaatggcttatcgacgccatcacccaagctttccgcttcctcatcgcatttggaacagtctccttggtttccgtgctcgtgatgaccgcgatcaaccacagtgcattcaccgcgaccatgcagggttacgacgactccgcctctgttgtggccttgatcgtcctgagcattctgtatctgcccaacatgatgatctttgcgatgggcaatctgatcggctcacccctttacttcggtgacgcctccatcagcgtcttcagcgtgcattccgttccattgccaccgcttcccatcctcgcagctctccccagcgaagccctctcatgggcagtggccttactggtcatccctgcaattattgccacctgggtctgcgtgagaaaccccatgcgccttgccgtgaacacaacagcagcagtcatttcagcactgtgtttcctcgtcctggcagttttcgccggcggaaccttgggcgtatacaactacgtcggactcaacctcctggcgtcagttggcctagttttcgtctatttcgccctcgttggactcctcatcgccggaatcgacaagctgcgcaaccctgtagaagttaagtctgttaaggctgtggctgttgtggagcccgagcctgaagaagttgaagaggacgaagaggagcatgttgaagaagaagtagatgaggaggaagaggaagttgaggaaggggtagaagaggtcgaagaagacgacgcagaggatcctgaagagaatcctgaagaggaagaatccgacgaagaaattgagacagaaactgaggctgaagaaaccaatgatggttccgaggccgaagaccgttaacatatctgttgtgaattctg

SEQ ID NO: 1244 - protein, 432 aa, Corynebacterium glutamicum
VLIPHGVAVLLVIILAVASLMFTNSSMVNLSATIAQLWLSLNLGAVDGSGEVISVLPTLPGFIFLWAIAARIHRAVKDRVSIADLGVLAALVLGIPLALTAIAAFMLFDASSVLNVEVPPITRLLRVMLFHLSALFLGMGPRLWQALARRYGAPEWLIDAITQAFRFLIAFGTVSLVSVLVMTAINHSAFTATMQGYDDSASVVALIVLSILYLPNMMIFAMGNLIGSPLYFGDASISVFSVHSVPLPPLPILAALPSEALSWAVALLVIPAIIATWVCVRNPMRLAVNTTAAVISALCFLVLAVFAGGTLGVYNYVGLNLLASVGLVFVYFALVGLLIAGIDKLRNPVEVKSVKAVAVVEPEPEEVEEDEEEHVEEEVDEEEEEVEEGVEEVEEDDAEDPEENPEEEESDEEIETETEAEETNDGSEAEDR

SEQ ID NO: 1245 - DNA, 737 bp, Corynebacterium glutamicum
  CDS (1)..(714): FRXA02624
cagggctacgacgactccgcctctgttgtggccttgatcgtcctgagcattctgtatctgcccaacatgatgatctttgcgatgggcaatctgatcggctcacccctttacttcggtgacgcctccatcagcgtcttcagcgtgcattccgttccattgccaccgcttcccatcctcgcagctctccccagcgaagccctctcatgggcagtggccttactggtcatccctgcaattattgccacctgggtctgcgtgagaaaccccatgcgccttgccgtgaacacaacagcagcagtcatttcagcactgtgtttcctcgtcctggcagttttcgccggcggaaccttgggcgtatacaactacgtcggactcaacctcctggcgtcagttggcctagttttcgtctatttcgccctcgttggactcctcatcgccggaatcgacaagctgcgcaaccctgtagaagttaagtctgttaaggctgtggctgttgtggagcccgagcctgaagaagttgaagaggacgaagaggagcatgttgaagaagaagtagatgaggaggaagaggaagttgaggaaggggtagaagaggtcgaagaagacgacgcagaggatcctgaagagaatcctgaagaggaagaatccgacgaagaaattgagacagaaactgaggctgaagaaaccaatgatggttccgaggccgaagaccgttaacatatctgttgtgaattctg

SEQ ID NO: 1246 - protein, 238 aa, Corynebacterium glutamicum
QGYDDSASVVALIVLSILYLPNMMIFAMGNLIGSPLYFGDASISVFSVHSVPLPPLPILAALPSEALSWAVALLVIPAIIATWVCVRNPMRLAVNTTAAVISALCFLVLAVFAGGTLGVYNYVGLNLLASVGLVFVYFALVGLLIAGIDKLRNPVEVKSVKAVAVVEPEPEEVEEDEEEHVEEEVDEEEEEVEEGVEEVEEDDAEDPEENPEEEESDEEIETETEAEETNDGSEAEDR

SEQ ID NO: 1247 - DNA, 1128 bp, Corynebacterium glutamicum
  CDS (101)..(1105): RXN02626
gtagcggtcgaattatttgcctgtgggcataattttgagacaaaataatagaaacgtctcagatgttgggaagttcttcacgctatcagttagggagcacatgagtactcaagttgaactcaaaacaccgaaatcggaagaccgggcagcatatatcgctgcattgggattcccggtcttggtcatcattggcggcatcatcggattcacagcctcggatgttgtgctcaatatttcttcgtgggtcaatcctttgctgggcatcatcatgttctccatgggcctgaccttgaagccagttgacttcgcccttgttgctaaacgcccactcccagttcttatcggcgtgatcgcccagtttgtcatcatgcccctgatcgcattgctggtggtctgggttttgcagctgcctgcggaaattgcggccggtgtcatcttggttggttgtgcacctggcggaacttcctccaacgtggtgtcttacctgtcccgtggtgatgttgcgctgtctgtcaccatgacttccatctccacgctgcttgctccaattttcactccactgcttaccctgtggctggcggggcaatacatgccacttaatgccgctgatatggctgtatccatcgtccaagttgtgctgatcccagtcgtgggcggacttgttgtgcggttgatcttcccgacactcattggcaaggttttgcctcttttgccatggatttcagtcattgcgatttcattgatcgttgccatcgtggtcgctggttcaagggataaaatcctcgaagcaggactgctcgtgctggctgccgtgattattcacaacaccctcggctactccctgggatacctcgctgcgaaattcactgggcagcctgctgcagctcgacgcactaccgcgattgaggtcggtatgcaaaactccggcctcgcagatggactcgcatcccagtacatgtcaccaatgtctgctctgccaggcgctatcttctctgtctggcacaacctttccggagcacttcttgctgcattgtgcagggcgtccgataagagggctgcggagaaggtggcttcagaaaaggctgcctcggagaaggccgcttcctaaaaggcttcgctcctaaaact

SEQ ID NO: 1248 - protein, 335 aa, Corynebacterium glutamicum
MSTQVELKTPKSEDRAAYIAALGFPVLVIIGGIIGFTASDVVLNISSWVNPLLGIIMFSMGLTLKPVDFALVAKRPLPVLIGVIAQFVIMPLIALLVVWVLQLPAEIAAGVILVGCAPGGTSSNVVSYLSRGDVALSVTMTSISTLLAPIFTPLLTLWLAGQYMPLNAADMAVSIVQVVLIPVVGGLVVRLIFPTLIGKVLPLLPWISVIAISLIVAIVVAGSRDKILEAGLLVLAAVIIHNTLGYSLGYLAAKFTGQPAAARRTTAIEVGMQNSGLADGLASQYMSPMSALPGAIFSVWHNLSGALLAALCRASDKRAAEKVASEKAASEKAAS

SEQ ID NO: 1249 - DNA, 963 bp, Corynebacterium glutamicum
  CDS (101)..(940): RXN02656
gccatgtgggacagtctagccatctccttacacccgtgaaactcctatttcattaacgcattgatctcggcttttctaacctaggtataaggtaacagctatgattttcggcgtactcgcatacttgggatggggcatgttcccggcctttttcccactacttcttccggcaggaccgttcgaaattttagcgcatcggatcctatggactgctgtattaatgatgattatcattagtttcacgtcgggatggaaagagcttaagtccgctgatcgcggtacatggttacgcattatattgtcatcgttgtttattgccgggaactggctgatctatgtcatcgctgtcaattctgggcaagttactgaagccgctctcggatactttattaaccccctgttaagtgtcgtgcttggcattgtgttcttcaaagaacagttacgaaaactgcaaattagtgcggtggttattgctgctgcgggggttttggtactaacatttctaggtgataagccaccgtatttagcgataacactagcatttacattcggcatctatggagcgttgaaaaaacaagtcaagatgtctgctgctagttctttgtgcgctgaaactttagtactgctgcccatcgcagtcatatacctgattgggctcgaagcttccggtcacagtacctttttcaacaatggcagtgggcacatggcgttattaatctgctcgggtttggtcacagccgtcccgctgttgatgtttgcattggccgccaaggcaatacctctttccactgtcggcatgctgcaatatctgaccccaacgatgcagatgctgtgggcattgtttgtggtcaacgaatcagtagaaccaatgcgttggttcggattcgttttcatttggatcgcagttactatttacatcacagatagcctacttaagaagtaggtaatagcagtattgatatg

SEQ ID NO: 1250 - protein, 280 aa, Corynebacterium glutamicum
MIFGVLAYLGWGMFPAFFPLLLPAGPFEILAHRILWTAVLMMIIISFTSGWKELKSADRGTWLRIILSSLFIAGNWLIYVIAVNSGQVTEAALGYFINPLLSVVLGIVFFKEQLRKLQISAVVIAAAGVLVLTFLGDKPPYLAITLAFTFGIYGALKKQVKMSAASSLCAETLVLLPIAVIYLIGLEASGHSTFFNNGSGHMALLICSGLVTAVPLLMFALAAKAIPLSTVGMLQYLTPTMQMLWALFVVNESVEPMRWFGFVFIWIAVTIYITDSLLKK

SEQ ID NO: 1251 - DNA, 756 bp, Corynebacterium glutamicum
  CDS (101)..(733): RXN02673
acgcccaaaacgctaatccgctgaacaggccgatgaaagtaatagagtgttctgtgtgggaacgccgagacataatgaagtcatttacaagcgccgccgcatggcagcgctcctagttctgctcgtcgtgattgccttgattatctgggcagtcgtcgcgcttcgaggtggatcatcggagcctgaggaagagcagccaaataatgctgtagtgacctcctcaatggaatcttccgcgacgtctagttcttcttctaaagaatccacgactgaagccaccacagaagaagagacttccagtgctgaaccaaccgcaacatcctccgttgcagcagatgcaaaaaagacctgtgagcttagtgacttggtgatttccgcaagcactaatcagccgactttctcaggttctgcgcagccagaattatttatggctgtgcataatccgactgctgttgattgcgaaattgacctcgaggagaacaaactccgtttcgaggtatacaatctcgcgaccaacgcacgaatctggtctgatgtcgactgcaaccctgcagttgaagacggcacgagcgtgttccctgccggcgaggatcgctacttccaggcaacatggtctcgtaccacttcagcgccaaaccagtgcaacaaccgcactgatgtccccgccggtggctactacttgcacactgtggtcggtaataacccttcaccagcggtgacctttaacctaacttaaacggccaagtccgtcggtga

SEQ ID NO: 1252 - protein, 211 aa, Corynebacterium glutamicum
MAALLVLLVVIALIIWAVVALRGGSSEPEEEQPNNAVVTSSMESSATSSSSSKESTTEATTEEETSSAEPTATSSVAADAKKTCELSDLVISASTNQPTFSGSAQPELFMAVHNPTAVDCEIDLEENKLRFEVYNLATNARIWSDVDCNPAVEDGTSVFPAGEDRYFQATWSRTTSAPNQCNNRTDVPAGGYYLHTVVGNNPSPAVTFNLT

SEQ ID NO: 1253 - DNA, 756 bp, Corynebacterium glutamicum; identical to SEQ ID NO: 1251
  CDS (101)..(733): FRXA02673

SEQ ID NO: 1254 - protein, 211 aa, Corynebacterium glutamicum; identical to SEQ ID NO: 1252

SEQ ID NO: 1255 - DNA, 1407 bp, Corynebacterium glutamicum
  CDS (101)..(1384): RXN02680
aataccaggtcaacacacacaggaaccgttcagaaaccttccagattgctcactttttaatttcacttttttgagaagttttacttttatattagttctcatgcgcctcaacaaacgactcccagcggcactctccggactgctgctctctgctgcccttcttgccggatgctccacttctggaaccgccgagaccacgacaacaaccgtttcatctgctgcggcatcaacaaccacttccacctcctctgcttcgtcttcctcttcctcctcctcttcctcctcttcctccgactcaagcaccaccgccgaaaccatctccaacaccgcggaagctgcccaagctttcttgtccaccctgtccaccgaagaacaagacgccgtactctacgactacgacgccgaagaaaagtccaccggctggtctaacttcccagtcaccttcgtgcagcgttccggcgtgaacctcaccgacctcactgaggaacagcaagcagctgccctcaacgtgctgaagaacctgctcaacgacgacgcctaccaaatgatcgaagacatcatggctagcgatcagtacctcaacgacgaaagcaacaccaccgaggattccctcggccagtactacatcgcattcttcggcgatccaagcagcgactccgactggtccatccaattcggcggacaccacatcggcatcaacaccaccttctccgacggtgccatcaccttcgccccaacccaccttggcacccagccttccgagtggaccaacgaggacggcgaaaccgttgcagcactaagcaacatgtacgaaaccgccttcgccttctacgacagcctcgccgaagagcagcaagcacagctctaccagggtgaagagttggattccatggtgtgcgcaccgggcagcacgtgcgactacccaaccggcaccggcttgaaaggctctgacctcaccgatgagcaaaaagaattgctcatcgatgtcatcgcaaactgggttggcctcgccgatgaggaaaccaccgaaactgaactcgatgccatccgcgaaaccctggatgacacctacatcaactggtccggcgccaccgagtacgacacctccaccggcgacggcatctacttccagatcagtggcccaaaggtctacattgagttcgctaaccagcaaggttctgcaggtgccgacatcgacggtgtcatcaccgctggatggggccacattcacaccatctaccgcgacccaaccaatgactacgctaactccgtaactcaggaagcagccagcggaatgatgggcggcggccctggtggtaatggtggcgagatgcctagcggtgacatgcctactggtgagatgccttctggcgctccatcaaactaacgccatttaagaggccgaac

SEQ ID NO: 1256 - protein, 428 aa, Corynebacterium glutamicum
MRLNKRLPAALSGLLLSAALLAGCSTSGTAETTTTTVSSAAASTTTSTSSASSSSSSSSSSSSSDSSTTAETISNTAEAAQAFLSTLSTEEQDAVLYDYDAEEKSTGWSNFPVTFVQRSGVNLTDLTEEQQAAALNVLKNLLNDDAYQMIEDIMASDQYLNDESNTTEDSLGQYYIAFFGDPSSDSDWSIQFGGHHIGINTTFSDGAITFAPTHLGTQPSEWTNEDGETVAALSNMYETAFAFYDSLAEEQQAQLYQGEELDSMVCAPGSTCDYPTGTGLKGSDLTDEQKELLIDVIANWVGLADEETTETELDAIRETLDDTYINWSGATEYDTSTGDGIYFQISGPKVYIEFANQQGSAGADIDGVITAGWGHIHTIYRDPTNDYANSVTQEAASGMMGGGPGGNGGEMPSGDMPTGEMPSGAPSN

SEQ ID NO: 1257 - DNA, 1407 bp, Corynebacterium glutamicum; identical to SEQ ID NO: 1255
  CDS (101)..(1384): FRXA02680

SEQ ID NO: 1258 - protein, 428 aa, Corynebacterium glutamicum; identical to SEQ ID NO: 1256

SEQ ID NO: 1259 - DNA, 549 bp, Corynebacterium glutamicum
  CDS (101)..(526): FRXA02679
caccattaccaccagggccgccgcccatcattccgctggctgcttcctgagttacggagttagcgtagtcattggttgggtcgcggtagatggtgtgaatgtggccccatccagcggtgatgacaccgtcgatgtcggcacctgcagaaccttgctggttagcgaactcaatgtagacctttgggccactgatctggaagtagatgccgtcgccggtggaggtgtcgtactcggtggcgccggaccagttgatgtaggtgtcatccagggtttcgcggatggcatcgagttcagtttcggtggtttcctcatcggcgaggccaacccagtttgcgatgacatcgatgagcaattctttttgctcatcggtgaggtcagagcctttcaagccggtgccggttgggtagtcgcacgtgctgcccggtgcgcacaccatggaatccaactcttcaccctggtagagctgtgcttgctgctcttcggcgaggctgtcgtagaaggcgaaggcggtttcgtacatgttgcttagtgctgcaacggtttcgccgt

SEQ ID NO: 1260 - protein, 142 aa, Corynebacterium glutamicum
VAPSSGDDTVDVGTCRTLLVSELNVDLWATDLEVDAVAGGGVVLGGAGPVDVGVIQGFADGIEFSFGGFLIGEANPVCDDIDEQFFLLIGEVRAFQAGAGWVVARAARCAHHGIQLFTLVELCLLLFGEAVVEGEGGFVHVA

SEQ ID NO: 1261 - DNA, 567 bp, Corynebacterium glutamicum
  CDS (101)..(544): FRXA02681
cgaggctgtcgtagaaggcgaaggcggtttcgtacatgttgcttagtgctgcaacggtttcgccgtcctcgttggtccactcggaaggctgggtgccaaggtgggttggggcgaaggtgatggcaccgtcggagaaggtggtgttgatgccgatgtggtgtccgccgaattggatggaccagtcggagtcgctgcttggatcgccgaagaatgcgatgtagtactggccgagggaatcctcggtggtgttgctttcgtcgttgaggtactgatcgctagccatgatgtcttcgatcatttggtaggcgtcgtcgttgagcaggttcttcagcacgttgagggcagctgcttgctgttcctcagtgaggtcggtgaggttcacgccggaacgctgcacgaaggtgactgggaagttagaccagccggtggacttttcttcggcgtcgtagtcgtagagtacggcgtcttgttcttcggtggacagggtggacaagaaagcttgggcagcttccgcggtgttggagatggtttcggcggtggtgcttgagtcggaggaagaggaggaag

SEQ ID NO: 1262 - protein, 148 aa, Corynebacterium glutamicum
VGWGEGDGTVGEGGVDADVVSAELDGPVGVAAWIAEECDVVLAEGILGGVAFVVEVLIASHDVFDHLVGVVVEQVLQHVEGSCLLFLSEVGEVHAGTLHEGDWEVRPAGGLFFGVVVVEYGVLFFGGQGGQESLGSFRGVGDGFGGGA

SEQ ID NO: 1263 - DNA, 1899 bp, Corynebacterium glutamicum
  CDS (101)..(1876): RXN02693
cagaccaagtgttatttttgttgaaaaaatcacattgtaaatcgagcaaaaccaacctatgccctgcagaattgtgcatgctctgccaagatgactcaatatggtttcgctccccagactagcgtctctgctcaccactcgcctggcaacgcttaaacccgcactaaaacctgccacccacctcgcctccctcggcgcgcaggtcattgcagagctagttccggggatccgaatgtcgccaaaccgcaggcgaatcctccctgcaaatatgggcgctggctttatcggagcggaaatcgcaatgtggtgggctctctcgccgtcattgttgccgaaaccgtggtgggttacggctgctaacctggctgttttacaagcggtggggcatgcggcagcgacgggaatccactcgatcctccccagaaccaaccggcgggtatccaggaaaatttacaacgccacccacatcgcaactggtgccatcacgttgaccaccacggttgtgggattgatcaggcatcgcacccaaatccggctgattgggcagaagaattttggaccgaaggagacgatcgcgggcattagtgtcggcaccttggggtacggcgcgctgctgatcaccggcgaattaacccagcacagtattaatgaggtcaagctcctaattgagaggtttttaccgccgtggataagtttcatcgcagcggtttcggtcattacattgaccactttgaccttggccgatcgcgttttgttgcggcgcatcttgcataattctgcaattcaagcagcgcaccttaatcgcatggtgttcccaggaactgagcagccgtgggagccggagcgttcgggtagcccgtggtcgtatgaaaaatggggtgcggtgggttcgcagggccgtgcagtgttgtcgggaggcccacgcaaagatgacatcatcacggtaaccaggctttctgacacggaaacacatgaaccgattcgtatttttatcggtatggttccgggacgatccttaagcgatcaggtggatcttgtcattcatgaaatgcgccgcacgggagccctgcgccgcgaccacatcgtgatcaacaattccacgggcaccggctggatcaccgattggtccgcccacacctttgagttcctcaccggcggaaactgcgtgacaatttccatgcaatattcttatcttcccagtgcactgagctggtacaaggacaacgacggccccattaatgcggcgagaatgcttatcgacgccgtcctccacgagctagaccagcttcccaccgggagtcgcccaaagctgttcctcgcgggagagtcactgggggcgtatgggttggctgaggtgtggggagacgtcgaaaagcttcttggaaccgctgacggcgtgctgctcagtggggcgccgcgtttttcggacgccatgaatgcgttgcgcacccggcgcgatgcgagcagctccgagcggctgcccgtgattgatagcgggcggcacatccgttttgcgggcgagcctgagcaccttgatatgccggctacctggcagtttccgcgcatgatcgtggcgcagcacgcctctgatccaattgtgtggtggaacgcggagctgtttattcggcggccggaatggttgaaaactcccaagcaagaccaccaagatgtctttccccgcttgcgatggatgccgtttgtaaccggctggcaggtggctttggatttgttcacttcaacctccgttcccggcgggcacgggcacaattatcacgaggagtttattgattattgggcagctcttttggaccgcgaagtcacccccgagctgcgccacagcattgcttattggatccgcgcgaaccacatcaaacgctagagtgattccatgacgcatgc

SEQ ID NO: 1264 - protein, 592 aa, Corynebacterium glutamicum
MVSLPRLASLLTTRLATLKPALKPATHLASLGAQVIAELVPGIRMSPNRRRILPANMGAGFIGAEIAMWWALSPSLLPKPWWVTAANLAVLQAVGHAAATGIHSILPRTNRRVSRKIYNATHIATGAITLTTTVVGLIRHRTQIRLIGQKNFGPKETIAGISVGTLGYGALLITGELTQHSINEVKLLIERFLPPWISFIAAVSVITLTTLTLADRVLLRRILHNSAIQAAHLNRMVFPGTEQPWEPERSGSPWSYEKWGAVGSQGRAVLSGGPRKDDIITVTRLSDTETHEPIRIFIGMVPGRSLSDQVDLVIHEMRRTGALRRDHIVINNSTGTGWITDWSAHTFEFLTGGNCVTISMQYSYLPSALSWYKDNDGPINAARMLIDAVLHELDQLPTGSRPKLFLAGESLGAYGLAEVWGDVEKLLGTADGVLLSGAPRFSDAMNALRTRRDASSSERLPVIDSGRHIRFAGEPEHLDMPATWQFPRMIVAQHASDPIVWWNAELFIRRPEWLKTPKQDHQDVFPRLRWMPFVTGWQVALDLFTSTSVPGGHGHNYHEEFIDYWAALLDREVTPELRHSIAYWIRANHIKR

SEQ ID NO: 1265 - DNA, 1747 bp, Corynebacterium glutamicum
  CDS (101)..(1747): FRXA02693
cagaccaagtgttatttttgttgaaaaaatcacattgtaaatcgagcaaaaccaacctatgccctgcagaattgtgcatgctctgccaagatgactcaatatggtttcgctccccagactagcgtctctgctcaccactcgcctggcaacgcttaaacccgcactaaaacctgccacccacctcgcctccctcggcgcgcaggtcattgcagagctagttccggggatccgaatgtcgccaaaccgcaggcgaatcctccctgcaaatatgggcgctggctttatcggagcggaaatcgcaatgtggtgggctctctcgccgtcattgttgccgaaaccgtggtgggttacggctgctaacctggctgttttacaagcggtggggcatgcggcagcgacgggaatccactcgatcctccccagaaccaaccggcgggtatccaggaaaatttacaacgccacccacatcgcaactggtgccatcacgttgaccaccacggttgtgggattgatcaggcatcgcacccaaatccggctgattgggcagaagaattttggaccgaaggagacgatcgcgggcattagtgtcggcaccttggggtacggcgcgctgctgatcaccggcgaattaacccagcacagtattaatgaggtcaagctcctaattgagaggtttttaccgccgtggataagtttcatcgcagcggtttcggtcattacattgaccactttgaccttggccgatcgcgttttgttgcggcgcatcttgcataattctgcaattcaagcagcgcaccttaatcgcatggtgttcccaggaactgagcagccgtgggagccggagcgttcgggtagcccgtggtcgtatgaaaaatggggtgcggtgggttcgcagggccgtgcagtgttgtcgggaggcccacgcaaagatgacatcatcacggtaaccaggctttctgacacggaaacacatgaaccgattcgtatttttatcggtatggttccgggacgatccttaagcgatcaggtggatcttgtcattcatgaaatgcgccgcacgggagccctgcgccgcgaccacatcgtgatcaacaattccacgggcaccggctggatcaccgattggtccgcccacacctttgagttcctcaccggcggaaactgcgtgacaatttccatgcaatattcttatcttcccagtgcactgagctggtacaaggacaacgacggccccattaatgcggcgagaatgcttatcgacgccgtcctccacgagctagaccagcttcccaccgggagtcgcccaaagctgttcctcgcgggagagtcactgggggcgtatgggttggctgaggtgtggggagacgtcgaaaagcttcttggaaccgctgacggcgtgctgctcagtggggcgccgcgtttttcggacgccatgaatgcgttgcgcacccggcgcgatgcgagcagctccgagcggctgcccgtgattgatagcgggcggcacatccgttttgcgggcgagcctgagcaccttgatatgccggctacctggcagtttccgcgcatgatcgtggcgcagcacgcctctgatccaattgtgtggtggaacgcggagctgtttattcggcggccggaatggttgaaaactcccaagcaagaccaccaagatgtctttaaccgcttgcgatggatgccgtttgttgccggctggcaggtggctttggatttgttcacttcaacctccgtt

SEQ ID NO: 1266 - protein, 549 aa, Corynebacterium glutamicum
MVSLPRLASLLTTRLATLKPALKPATHLASLGAQVIAELVPGIRMSPNRRRILPANMGAGFIGAEIAMWWALSPSLLPKPWWVTAANLAVLQAVGHAAATGIHSILPRTNRRVSRKIYNATHIATGAITLTTTVVGLIRHRTQIRLIGQKNFGPKETIAGISVGTLGYGALLITGELTQHSINEVKLLIERFLPPWISFIAAVSVITLTTLTLADRVLLRRILHNSAIQAAHLNRMVFPGTEQPWEPERSGSPWSYEKWGAVGSQGRAVLSGGPRKDDIITVTRLSDTETHEPIRIFIGMVPGRSLSDQVDLVIHEMRRTGALRRDHIVINNSTGTGWITDWSAHTFEFLTGGNCVTISMQYSYLPSALSWYKDNDGPINAARMLIDAVLHELDQLPTGSRPKLFLAGESLGAYGLAEVWGDVEKLLGTADGVLLSGAPRFSDAMNALRTRRDASSSERLPVIDSGRHIRFAGEPEHLDMPATWQFPRMIVAQHASDPIVWWNAELFIRRPEWLKTPKQDHQDVFNRLRWMPFVAGWQVALDLFTSTSV

SEQ ID NO: 1267 - DNA, 579 bp, Corynebacterium glutamicum
  CDS (101)..(556): RXN02696
cttgggaaccgaccgctagcgtagaaaatcaagttaagggtgtgacgagcaccccagctgcacatgaaatttaagacattccaggtgaagggaaactgccatgtccatgctcaagaagactaaagaattcttcggactcgctccatacgaagcggagcacgaggatgcttactatgcagatgaaccacgttacgagggcaccgctgcgtacgcacctgaataccgtgagcgtgactacggctatgcaccagaggcaccagcccctgttgctccatcgccagcacctcgctcttaccagtccaccatcgttccagtagagcttcattcctttgaagacgctcaggttattggtggagcatttcgcgacggcgacgcagttgttttcgacatgagcttgctttcccgtgaggaagcacgccgcattgtggacttcgctgcaggcctgtgcttcgcattgcgtggcaagatgcagaagattgacagcgtcaccttcgctgtcgttccagagctgtccaacatcagcacttccgagctcgagcgcgccgcacgcatccgctaaacacaccctcgtggtgtgga

SEQ ID NO: 1268 - protein, 152 aa, Corynebacterium glutamicum
MSMLKKTKEFFGLAPYEAEHEDAYYADEPRYEGTAAYAPEYRERDYGYAPEAPAPVAPSPAPRSYQSTIVPVELHSFEDAQVIGGAFRDGDAVVFDMSLLSREEARRIVDFAAGLCFALRGKMQKIDSVTFAVVPELSNISTSELERAARIR

SEQ ID NO: 1269 - DNA, 578 bp, Corynebacterium glutamicum
  CDS (100)..(555): FRXA02696
  modified_base (1): a, t, c, or g
  modified_base (6): a, t, c, or g
  modified_base (22): a, t, c, or g
  modified_base (32): a, t, c, or g
  modified_base (37): a, t, c, or g
  modified_base (39): a, t, c, or g
  modified_base (70): a, t, c, or g
  modified_base (80): a, t, c, or g
  modified_base (87): a, t, c, or g
  modified_base (94): a, t, c, or g
ngcttnaagaaataaagccctncccagttaanggtgngnatgggtaccagccctgtggacgctgtacatntaagtcattnctggttnaggtganctgccatgtccatgctcaagaagactaaagaattcttcggactcgctccatacgaagcggagcacgaggatgcttactatgcagatgaaccacgttacgagggcaccgctgcgtacgcacctgaataccgtgagcgtgactacggctatgcaccagaggcaccagcccctgttgctccatcgccagcacctcgctcttaccagtccaccatcgttccagtagagcttcattcctttgaagacgctcaggttattggtggagcatttcgcgacggcgacgcagttgttttcgacatgagcttgctttcccgtgaggaagcacgccgcattgtggacttcgctgcaggcctgtgcttcgcattgcgtggcaagatgcagaagattgacagcgtcaccttcgctgtcgttccagagctgtccaacatcagcacttccgagctcgagcgcgccgcacgcatccgctaaacacaccctcgtggtgtgga

SEQ ID NO: 1270 - protein, 152 aa, Corynebacterium glutamicum; identical to SEQ ID NO: 1268

SEQ ID NO: 1271 - DNA, 1650 bp, Corynebacterium glutamicum
  CDS (101)..(1627): RXN02697
tttggctcacctcgatgatgtagacatccccgatgaggtgcgcgcacagttgcgggcactggctatccgctcaaccgaacgtcggatgtagtagacgcgtatgacactttttcaacgtttaaccaaccctgtagtgctcggcggcctagcaggtgttttgcttctgctcggctctttcggtggcggtgccattcggtaccgtggcggagtgctcgatgcgttggggcttaacttccttgcttttggccacgcgcagggtatttccaataccgtgttgtgggttgggcagctgctgctgattggcgcgtgggttcaccttggacgtcggttgttcaagaaaaaagtcgctgatgacaccgcagacgctgctgacttaggtcttgtaaagcgcacgttgtatgccatggtggtgcccctcatttttgcggcaccaatgatgtcgcgtgatgtttattcctatctcatgcagggcgcgatgctgcgtgatggcttcgatccctacactgagggcgctgcggtaaaccctggccccatgttgcttgaggtctctcatgattggcgcaacaccacgacgccgtatggtccactacacctgtggattggagacatgatcaccacggttgtgggcgataatgtcaccttgggcgtcgtcgcttacaagatcttgtcgatcattggccttgctgtgacaggctggagcattgtccgcattgcacaacattttggagccaacccagcaattgcattgtggattggtgtggccaatcctgtgatgatcatccacatgatcggcggcatgcacaatgaatccctcatggtgggattggtcagcgtcggcttgttgctagcactgaagaagcgtttcgtggcaggtgtggcactcattgcagtggctgtgtcgctgaaagctacagcggcgattgcacttccttttgtggtgtggatcggcatgcatcatttcgcaggattcttagccaccaaaaagggcaaagactcccctacccttaagcaacaggtccccgcgttctttgccactggagctgcaggtgttgctgtcactggtgttgttgtcagtgcgatcacttgggcgtctggcgcttcgtggggctggatcagtgagatcagtggcaacagcaaggtaatcaacccgctggctttcccttctttggtggccagtgtgatcaccatggtggctgaagtgttcgttgacgatttcgactacaacgcagtggttaatgttgtgcgctcaatctccatgctgatcatgcttggcgggttggtcgtatgttggtggctgttccgccagaacgaacgcagggcggtcactggtacagcagcggcttatgccgtggcttttgtgttcaattctgtgaccttgccgtggtactacgccagcttgatctctttgctcggcacatttaaaccaccgatgtggttgattcgcttcgcagcgggtgcttcggtgtttatcgcgctgatgtttaccggaagtggaaaccaccagctgtacaacatcgttacggtgatcatcgcagcaattatcgcgtggcttgccaccgtggtgatctttgatgacactgaccctgcaacaacggccacggagaaaccctccccgcataccgtttcctagttgcataaggtaaaccgcca

SEQ ID NO: 1272 - protein, 509 aa, Corynebacterium glutamicum
MTLFQRLTNPVVLGGLAGVLLLLGSFGGGAIRYRGGVLDALGLNFLAFGHAQGISNTVLWVGQLLLIGAWVHLGRRLFKKKVADDTADAADLGLVKRTLYAMVVPLIFAAPMMSRDVYSYLMQGAMLRDGFDPYTEGAAVNPGPMLLEVSHDWRNTTTPYGPLHLWIGDMITTVVGDNVTLGVVAYKILSIIGLAVTGWSIVRIAQHFGANPAIALWIGVANPVMIIHMIGGMHNESLMVGLVSVGLLLALKKRFVAGVALIAVAVSLKATAAIALPFVVWIGMHHFAGFLATKKGKDSPTLKQQVPAFFATGAAGVAVTGVVVSAITWASGASWGWISEISGNSKVINPLAFPSLVASVITMVAEVFVDDFDYNAVVNVVRSISMLIMLGGLVVCWWLFRQNERRAVTGTAAAYAVAFVFNSVTLPWYYASLISLLGTFKPPMWLIRFAAGASVFIALMFTGSGNHQLYNIVTVIIAAIIAWLATVVIFDDTDPATTATEKPSPHTVS

SEQ ID NO: 1273 - DNA, 722 bp, Corynebacterium glutamicum
  CDS (1)..(699): FRXA02697
ccttttgtggtgtggatcggcatgcatcatttcgcaggattcttagccaccaaaaagggcaaagactcccctacccttaagcaacaggtccccgcgttctttgccactggagctgcaggtgttgctgtcactggtgttgttgtcagtgcgatcacttgggcgtctggcgcttcgtggggctggatcagtgagatcagtggcaacagcaaggtaatcaacccgctggctttcccttctttggtggccagtgtgatcaccatggtggctgaagtgttcgttgacgatttcgactacaacgcagtggttaatgttgtgcgctcaatctccatgctgatcatgcttggcgggttggtcgtatgttggtggctgttccgccagaacgaacgcagggcggtcactggtacagcggcggcttatgccgtggcttttgtgttcaattctgtgaccttgccgtggtactacgccagcttgatctctttgctcggcacatttaaaccaccgatgtggttgattcgcttcgcagcgggtgcttcggtgtttatcgcgctgatgtttaccggaagtggaaaccaccagctgtacaacatcgttacggtgatcatcgcagcaattatcgcgtggcttgccaccgtggtgatctttgatgacactgaccctgcaacaacggccacggagaaaccctccccgcataccgtttcctagttgcataaggtaaaccgcca

SEQ ID NO: 1274 - protein, 233 aa, Corynebacterium glutamicum
PFVVWIGMHHFAGFLATKKGKDSPTLKQQVPAFFATGAAGVAVTGVVVSAITWASGASWGWISEISGNSKVINPLAFPSLVASVITMVAEVFVDDFDYNAVVNVVRSISMLIMLGGLVVCWWLFRQNERRAVTGTAAAYAVAFVFNSVTLPWYYASLISLLGTFKPPMWLIRFAAGASVFIALMFTGSGNHQLYNIVTVIIAAIIAWLATVVIFDDTDPATTATEKPSPHTVS

SEQ ID NO: 1275 - DNA, 748 bp, Corynebacterium glutamicum
  CDS (101)..(748): FRXA02719
tttggctcacctcgatgatgtagacatccccgatgaggtgcgcgcacagttgcgggcactggctatccgctcaaccgaacgtcggatgtagtagacgcgtatgacactttttcaacgtttaaccaaccctgtagtgctcggcggcctagcaggtgttttgcttctgctcggctctttcggtggcggtgccattcggtaccgtggcggagtgctcgatgcgttggggcttaacttccttgcttttggccacgcgcagggtatttccaataccgtgttgtgggttgggcagctgctgctgattggcgcgtgggttcaccttggacgtcggttgttcaagaaaaaagtcgctgatgacaccgcagacgctgctgacttaggtcttgtaaagcgcacgttgtatgccatggtggtgcccctcatttttgcggcaccaatgatgtcgcgtgatgtttattcctatctcatgcagggcgcgatgctgcgtgatggcttcgatccctacactgagggcgctgcggtaaaccctggccccatgttgcttgaggtctctcatgattggcgcaacaccacgacgccgtatggtccactacacctgtggattggagacatgatcaccacggttgtgggcgataatgtcaccttgggcgtcgtcgcttacaagatcttgtcgatcattggccttgctgtgacaggctggagcattgtccgcattgcacaacattttggagccaacccagcaattgcattg

SEQ ID NO: 1276 - protein, 216 aa, Corynebacterium glutamicum
MTLFQRLTNPVVLGGLAGVLLLLGSFGGGAIRYRGGVLDALGLNFLAFGHAQGISNTVLWVGQLLLIGAWVHLGRRLFKKKVADDTADAADLGLVKRTLYAMVVPLIFAAPMMSRDVYSYLMQGAMLRDGFDPYTEGAAVNPGPMLLEVSHDWRNTTTPYGPLHLWIGDMITTVVGDNVTLGVVAYKILSIIGLAVTGWSIVRIAQHFGANPAIAL

SEQ ID NO: 1277 - DNA, 825 bp, Corynebacterium glutamicum
  CDS (101)..(802): RXN02720
ccacgctgcaccatcgaagacgaagatctgttttcttaccgccgcgaaggcacgacaggccgccaggccggcgtggtgtggctgccaaaggaggcataaattggagcgccgcgaagagctgcaggtacgactgcagcaggtgcaagcgcgtatcgacgcgaccctcaacgaacacaaccgccccgagggcagtgtacgtctgttgccggtcaccaaattccaccccgtggaagacatcaagatcttacaagagtttggtgtcaccgcagtgggagagaaccgcgaacaagaagcacgcgccaaagcactcgaacttcccgacatggactttcatatgattggccaaatccaatcaaagaaagccaactcgatcgccaggtgggcagctgcagtgcactccgttgatagcgagaaaatcgccgaagcattgggcaggggagtagcccttgcattggatagaggcgaccgcaccagtgacgagcttccgtgttttattcaactgagtttggatggtgacccgagccgaggtggaactccattgagccaggtcacacaacttgccgattgcatcagtgacaccacacatctgcgttttgagggcctcatgtgcgtcccaccgcttggttggggccctgaaaaagctttttcccaggcaagagacgtactttcaggtttagaggaacactttgacaggtctttggaattttcggcaggtatgtctggagacctagttgctgcgattaaacacggctcaacaatcgtgcgtgtcggaactgaaattcttgggaaccgaccgctagcgtagaaaatcaagttaagggtgtg

SEQ ID NO: 1278 - protein, 234 aa, Corynebacterium glutamicum
LERREELQVRLQQVQARIDATLNEHNRPEGSVRLLPVTKFHPVEDIKILQEFGVTAVGENREQEARAKALELPDMDFHMIGQIQSKKANSIARWAAAVHSVDSEKIAEALGRGVALALDRGDRTSDELPCFIQLSLDGDPSRGGTPLSQVTQLADCISDTTHLRFEGLMCVPPLGWGPEKAFSQARDVLSGLEEHFDRSLEFSAGMSGDLVAAIKHGSTIVRVGTEILGNRPLA

SEQ ID NO: 1279 - DNA, 727 bp, Corynebacterium glutamicum
  CDS (101)..(727): FRXA02720
ccacgctgcaccatcgaagacgaagatctgttttcttaccgccgcgaaggcacgacaggccgccaggccggcgtggtgtggctgccaaaggaggcataaattggagcgccgcgaagagctgcaggtacgactgcagcaggtgcaagcgcgtatcgacgcgaccctcaacgaacacaaccgccccgagggcagtgtacgtctgttgccggtcaccaaattccaccccgtggaagacatcaagatcttacaagagtttggtgtcaccgcagtgggagagaaccgcgaacaagaagcacgcgccaaagcactcgaacttcccgacatggactttcatatgattggccaaatccaatcaaagaaagccaactcgatcgccaggtgggcagctgcagtgcactccgttgatagcgagaaaatcgccgaagcattgggcaggggagtagcccttgcattggatagaggcgaccgcaccagtgacgagcttccgtgttttattcaactgagtttggatggtgacccgagccgaggtggaactccattgagccaggtcacacaacttgccgattgcatcagtgacaccacacatctgcgttttgagggcctcatgtgcgtcccaccgcttggttggggccctgaaaaagctttttcccaggcaagagacgtactttcaggtttagaggaacactttgacaggtctttggaattttcggcaggtatgtctggagac

SEQ ID NO: 1280 - protein, 209 aa, Corynebacterium glutamicum
LERREELQVRLQQVQARIDATLNEHNRPEGSVRLLPVTKFHPVEDIKILQEFGVTAVGENREQEARAKALELPDMDFHMIGQIQSKKANSIARWAAAVHSVDSEKIAEALGRGVALALDRGDRTSDELPCFIQLSLDGDPSRGGTPLSQVTQLADCISDTTHLRFEGLMCVPPLGWGPEKAFSQARDVLSGLEEHFDRSLEFSAGMSGD

SEQ ID NO: 1281 - DNA, 927 bp, Corynebacterium glutamicum
  CDS (101)..(904): RXN02744
gccaaaacgtcatgattcgctctttggatacgggacaccgctcattggaagatgtcttcctggacatcaccggaaaagaactgaggagttaacgcacaccatgtctaaaccttttgaaaactctgcgctccgcggttcttctcgattcccagctggaacgttcacccctgctcccaaacgagccaccccggcaaaaatgttggctgctcagggcaagatggaatccctgctgtttcttcgccacggcgaacagcaactgctcagcatcatcattcccttggtcgcgctcatcgcactagcgaattttgatttcatccctggtgagaactccctcgacaagactttccccttcgcgctggccacagcagccatgagcgctggttttacaggtcaagccatcagcctagcttttgaccgccgctatggtgccctcaagcgcaccggcgccagcggtgttcccgcctggacgattatttttggcaaagtcatcgcagtcattgcagtcaccattgtgcagatcatctttctcggtgtgactgcactgctgttgggctggtccgcacctgtcggtggtgtgctctttggcatcgtgaccctatttgtgggtgtttccagcttcaccgcgctcggcatgctgatgggcggaacgttgtcctccgaattggtattggcactggctaacttgatttggattgtactgtccggccttgcagcatgggcggtcttttccccttccgtcaacgctgaaggagtgctgtccatcatcccatccgttgcgctgtcccaaggtatggttgacgcattcaacggcgaacttccgtggctccagctaggaattttggtgggctggctaattatcaccggcgtggccgcaaacaagctatttaacttctctgcgagccgctagatatacccttagtcggaaaa

SEQ ID NO: 1282 - protein, 268 aa, Corynebacterium glutamicum
MSKPFENSALRGSSRFPAGTFTPAPKRATPAKMLAAQGKMESLLFLRHGEQQLLSIIIPLVALIALANFDFIPGENSLDKTFPFALATAAMSAGFTGQAISLAFDRRYGALKRTGASGVPAWTIIFGKVIAVIAVTIVQIIFLGVTALLLGWSAPVGGVLFGIVTLFVGVSSFTALGMLMGGTLSSELVLALANLIWIVLSGLAAWAVFSPSVNAEGVLSIIPSVALSQGMVDAFNGELPWLQLGILVGWLIITGVAANKLFNFSASR

SEQ ID NO: 1283 - DNA, 927 bp, Corynebacterium glutamicum; identical to SEQ ID NO: 1281
  CDS (101)..(904): FRXA02744

SEQ ID NO: 1284 - protein, 268 aa, Corynebacterium glutamicum; identical to SEQ ID NO: 1282

SEQ ID NO: 1285 - DNA, 1689 bp, Corynebacterium glutamicum
  CDS (101)..(1666): RXN02770
tcgccggggcaaaaaccgtataattacagtcctattacgattcggggaaaggctgggtacttcacacatgttgtttcggaagtcacgcagcgcggtaatcatgttggttgcagcgttagtgatgacaagctgtggtgatggggaaccggaaccaaccagccaccaaacaagccttttcggctacgcagttaactcttcgctggctacaaccaacgcggcgtcgctgttgggagtggctaatgatgctggtcttttggctgccagagtgtatccgggtgtgtatgttcagggtccttctgggcagatgattcccaacactgatcttgcttccacgcaggtattgccgggtattaaccgccaggtgatttacactatcaatgaagatgccacctactcagatggtcagcctgtggtgtgtgatgattttctgctctctgcgacagctgggcagatgccggaactgttccagtcccatgtgccattgacctcgcagattgagcgagtggactgtgtatctggttctaaagtagccaccgtggtgttcaaggaagacctcggtgagcgttggcgttatctttttgagcagggcgatttgttgccagcccatgccgttgcttccaaagcaggtatgaccttggaggagcttaatcaggcgttgaaggataaggatcctgaagcgttgactgaacctgctcgtgtgtggagcgaaggtttccagctgtcccagtttgatccagagctgcagacggcttttggcccgtacaaggtggattctgtgggtgaattcggcgaagtcaagctggtacgcaatgagttttacagtggcgaccaggcggttgaagcagaaatcacgatgtggcctaaaggctcggatctcagcgccattgcggataatggaaaccttcagatcgcacatgttgtggcgtgggagagcgagccgtgggtaaatcgcgatgacccattgaatccttatgacattaaggaagaggtcggtgttttgactgagcagctcaccttggccagtgccggtgtgttttacgctgcggaggcccggcaggcgtttgcggcctgcgttgaccaggaagcggtggctgcggcgtcgtcaagcatctctggaatcgatgtgcctgccgtaggtgtgcactcggtgcgtcaccaaaatccggtcgtgcaccaaatcggtgatctgccagcacagcacatggcggtggatattaatgccgcatcagcgttggcgggtcaatccatccgcattggctacgacggacccgatgagcgcaaggctgcaatggtggaggcgattcgccaaagttgtgagcctgccggtatcaccgttatcgatgcgtcgcaggaggctgttagtcttaatgatctcagtcgaaccgaagtcagtgaatggggctatgagcagtacttcgaagggacacttgacgctgttctgcgtacagtggatccacatcgggagtatgaaaatgccaataccattggaactgatgcggagtcgacgaggcgcactgaagaacaattgtgggctgaagtcccatcaattccactagcagcgcaaccccgagtgtttgtgatagatcgcacagtcggtaacgttgttgttaatacagacctagccggtatcggatggaacatggaccgttggtccagaagtgaggaataagtagtgagcgaacaagctct

SEQ ID NO: 1286 - protein, 522 aa, Corynebacterium glutamicum
MLVAALVMTSCGDGEPEPTSHQTSLFGYAVNSSLATTNAASLLGVANDAGLLAARVYPGVYVQGPSGQMIPNTDLASTQVLPGINRQVIYTINEDATYSDGQPVVCDDFLLSATAGQMPELFQSHVPLTSQIERVDCVSGSKVATVVFKEDLGERWRYLFEQGDLLPAHAVASKAGMTLEELNQALKDKDPEALTEPARVWSEGFQLSQFDPELQTAFGPYKVDSVGEFGEVKLVRNEFYSGDQAVEAEITMWPKGSDLSAIADNGNLQIAHVVAWESEPWVNRDDPLNPYDIKEEVGVLTEQLTLASAGVFYAAEARQAFAACVDQEAVAAASSSISGIDVPAVGVHSVRHQNPVVHQIGDLPAQHMAVDINAASALAGQSIRIGYDGPDERKAAMVEAIRQSCEPAGITVIDASQEAVSLNDLSRTEVSEWGYEQYFEGTLDAVLRTVDPHREYENANTIGTDAESTRRTEEQLWAEVPSIPLAAQPRVFVIDRTVGNVVVNTDLAGIGWNMDRWSRSEE

SEQ ID NO: 1287 - DNA, 1343 bp, Corynebacterium glutamicum
  CDS (1)..(1320): FRXA02770
ggtattaaccgccaggtgatttacactatcaatgaagatgccacctactcagatggtcagcctgtggtgtgtgatgattttctgctctctgcgacagctgggcagatgccggaactgttccagtcccatgtgccattgacctcgcagattgagcgagtggactgtgtatctggttctaaagtagccaccgtggtgttcaaggaagacctcggtgagcgttggcgttatctttttgagcagggcgatttgttgccagcccatgccgttgcttccaaagcaggtatgaccttggaggagcttaatcaggcgttgaaggataaggatcctgaagcgttgactgaacctgctcgtgtgtggagcgaaggtttccagctgtcccagtttgatccagagctgcagacggcttttggcccgtacaaggtggattctgtgggtgaattcggcgaagtcaagctggtacgcaatgagttttacagtggcgaccaggcggttgaagcagaaatcacgatgtggcctaaaggctcggatctcagcgccattgcggataatggaaaccttcagatcgcacatgttgtggcgtgggagagcgagccgtgggtaaatcgcgatgacccattgaatccttatgacattaaggaagaggtcggtgttttgactgagcagctcaccttggccagtgccggtgtgttttacgctgcggaggcccggcaggcgtttgcggcctgcgttgaccaggaagcggtggctgcggcgtcgtcaagcatctctggaatcgatgtgcctgccgtaggtgtgcactcggtgcgtcaccaaaatccggtcgtgcaccaaatcggtgatctgccagcacagcacatggcggtggatattaatgccgcatcagcgttggcgggtcaatccatccgcattggctacgacggacccgatgagcgcaaggctgcaatggtggaggcgattcgccaaagttgtgagcctgccggtatcaccgttatcgatgcgtcgcaggaggctgttagtcttaatgatctcagtcgaaccgaagtcagtgaatggggctatgagcagtacttcgaagggacacttgacgctgttctgcgtacagtggatccacatcgggagtatgaaaatgccaataccattggaactgatgcggagtcgacgaggcgcactgaagaacaattgtgggctgaagtcccatcaattccactagcagcgcaaccccgagtgtttgtgatagatcgcacagtcggtaacgttgttgttaatacagacctagccggtatcggatggaacatggaccgttggtccagaagtgaggaataagtagtgagcgaacaagctct

SEQ ID NO: 1288 - protein, 440 aa, Corynebacterium glutamicum
GINRQVIYTINEDATYSDGQPVVCDDFLLSATAGQMPELFQSHVPLTSQIERVDCVSGSKVATVVFKEDLGERWRYLFEQGDLLPAHAVASKAGMTLEELNQALKDKDPEALTEPARVWSEGFQLSQFDPELQTAFGPYKVDSVGEFGEVKLVRNEFYSGDQAVEAEITMWPKGSDLSAIADNGNLQIAHVVAWESEPWVNRDDPLNPYDIKEEVGVLTEQLTLASAGVFYAAEARQAFAACVDQEAVAAASSSISGIDVPAVGVHSVRHQNPVVHQIGDLPAQHMAVDINAASALAGQSIRIGYDGPDERKAAMVEAIRQSCEPAGITVIDASQEAVSLNDLSRTEVSEWGYEQYFEGTLDAVLRTVDPHREYENANTIGTDAESTRRTEEQLWAEVPSIPLAAQPRVFVIDRTVGNVVVNTDLAGIGWNMDRWSRSEE

SEQ ID NO: 1289 - DNA, 1314 bp, Corynebacterium glutamicum
  CDS (101)..(1291): RXN02781
ctccgagagtttccgcatccgcggttcgatcccggacgttccccgggagacgcggtgggaccggctgtggcggcccttctgggcgataccggctgccagcgtggtcgcggccctggttttcggtttcctgcttcccacgtgggaacgtgggttgtccgacgccgcgctcaaattcgtttttgagggtgggcctgatgccgcccgcgaggtgctgggcaccatcgccgcctccacgatctcagtgaccggtctcatcttctccatcactctcgttgttctgcagctggtgagcagccagttcagcccgcgaatgctcaacggctttctgcgcaaccgcatcgtgcaggccaccctggcgatgttcctggggacgttcgtgttctccctgacggtcatccggtacgtgtggagcgaggacgaggacatcaccggattcgtcccccgtgcttcagtgtcggttgccttcctgctggtgctcgggtgtctgggactgttcctggcgttcatccggctcatcaccttctcgatgcgggtggccaacgccatctccgagatcggggaggagacgatggctctggccgcacgtatctatcccgtgcagagcgacgacgcaggcccagtccaggggccgggctggtcaccgcggcccggtgacccccgggaagaaatccgggtgggcaaccatggttcgctggtgtggatcgactaccggaagctggtgtcctggtcgacggaacaccaggcggtgatcacggtcgaccggccggtgggggacttcctcgtcgagggccagccgctgctgcgggtctggtgggacggggaactcagcgaccgggaccgacgcgttctgcactcggccatcgaggtgcggaccgagcgggaacttcaccaggatgtggcgttcggactgcgtcaactggtcgacattgccgatcgtgcgttgtccccgggcatcaatgatccggccacggcggcccagtgtgtccaggagatccaccggatcttccgctatttggtcaccgtcatcgagcccagcccctacatcgccgatgacgacggtcgggtccgtgtggtgcaccagccgcaacgtatcgcggacatgctctatgaggtgatccgtgagatccatctctacggggcggattctgcgatgattccgaggctgctgcgcaccatggtcgaggacctggtgacggccgctgccgatcattccctgcctgccgtcgagcgtgcccgcggcatcctggacgatgagacggacgaggaccgcgacagtgacaccgcgaacgtctgatccgggatcaggtggcggtg

SEQ ID NO: 1290 - protein, 397 aa, Corynebacterium glutamicum
VVAALVFGFLLPTWERGLSDAALKFVFEGGPDAAREVLGTIAASTISVTGLIFSITLVVLQLVSSQFSPRMLNGFLRNRIVQATLAMFLGTFVFSLTVIRYVWSEDEDITGFVPRASVSVAFLLVLGCLGLFLAFIRLITFSMRVANAISEIGEETMALAARIYPVQSDDAGPVQGPGWSPRPGDPREEIRVGNHGSLVWIDYRKLVSWSTEHQAVITVDRPVGDFLVEGQPLLRVWWDGELSDRDRRVLHSAIEVRTERELHQDVAFGLRQLVDIADRALSPGINDPATAAQCVQEIHRIFRYLVTVIEPSPYIADDDGRVRVVHQPQRIADMLYEVIREIHLYGADSAMIPRLLRTMVEDLVTAAADHSLPAVERARGILDDETDEDRDSDTANV

SEQ ID NO: 1291 - DNA, 1314 bp, Corynebacterium glutamicum; identical to SEQ ID NO: 1289
  CDS (101)..(1291): FRXA02781

SEQ ID NO: 1292 - protein, 397 aa, Corynebacterium glutamicum; identical to SEQ ID NO: 1290

SEQ ID NO: 1293 - DNA, 1422 bp, Corynebacterium glutamicum
  CDS (101)..(1399): RXN02782
accccacccggtcccccttttttcctcactgacaccggagccgcctcaagcaccacgctgcaatcacagaagctagttgagcatattgtagaatataactatgccaacactgcttattgacacccatccgcatcttgcagcgcaacttcttgaccctggtttaggtgaacttcttacagccggttccaacaaaaaagtgcagtggcagtgccctaagcactccaatcacatctggacggcctcggttaataaccgcaccaatgcaaagaacccgcgctgcccctattgtgccggaacacgagtgttggcaggttttaatgatctcgccaccactcacccgcatcttgctgtacagctggttgaccaagatattgccgtcaccatttccgctggttctggcaaaagacaactgtggcagtgtgtagtaaacccaaaacaccagtggttggctacgccaaataatcgcacgagtactaaatctgcgagttctggttgcccctactgtgccaaccgagcggtattagtcggtgacaatgactttgcaacaacctaccccgaacttgcagcgcaattagtagatcaatctgcagcgacaacctttacagccggccacaacaagcctgttgagtggatctgttgcaagcatgaaccaccatttatctggaaaacctcaccaattttgcgtgtacgacagaacacccagtgccctgtgtgctcagagcgaactgtggcgccggcgcttaatgatcttgcaaccactcaccctaaacttgccgagcaaattgcagatcctcaaccaagtggtgtgagcgccgcggccattatccccaccattagcaggggttcccatacgcaattaacatggcaatgttctaaaaatcatgaccaccaatgggtcgccacagtaaaggatcgtgttcgcggaacagactgccccacctgcgcaaatacaggaacttcacgcaaagaggctgaacttattgaggtcatccgtgcattattcccaaacactgatgtccagcaaggtgcgctcattaatggacgtaccggtaatcaaggtgcatcgccgtcaaccgatgtactcataccgtccaaaaatctcgctatcgagttcaacggcctgtactggcactctgagcttttcatcaaagataagcattatcatgcgaacaaatcagctctcgcagaacaagccggtgtgcagctcattcatgtgtgggaggacgactggaatcttcgccgcgacattgtgatccgcatgatcgcacacaagcttcatgcaacccataacctcagtgctgttttgcctaccgaaactactgactcacgtgtggcaaccaccgctttcgccgtacactcacactgtcggtggtctctggttcacgcgctgctgcattcttgaacagcaaccatattcagggt

SEQ ID NO: 1294 - protein, 433 aa, Corynebacterium glutamicum
MPTLLIDTHPHLAAQLLDPGLGELLTAGSNKKVQWQCPKHSNHIWTASVNNRTNAKNPRCPYCAGTRVLAGFNDLATTHPHLAVQLVDQDIAVTISAGSGKRQLWQCVVNPKHQWLATPNNRTSTKSASSGCPYCANRAVLVGDNDFATTYPELAAQLVDQSAATTFTAGHNKPVEWICCKHEPPFIWKTSPILRVRQNTQCPVCSERTVAPALNDLATTHPKLAEQIADPQPSGVSAAAIIPTISRGSHTQLTWQCSKNHDHQWVATVKDRVRGTDCPTCANTGTSRKEAELIEVIRALFPNTDVQQGALINGRTGNQGASPSTDVLIPSKNLAIEFNGLYWHSELFIKDKHYHANKSALAEQAGVQLIHVWEDDWNLRRDIVIRMIAHKLHATHNLSAVLPTETTDSRVATTAFAVHSHCRWSLVHALLHS

SEQ ID NO: 1295 - DNA, 795 bp, Corynebacterium glutamicum
  CDS (101)..(772): FRXA02782
gtggatctgttgcaagcatgaaccaccatttatctggaaaacctcaccaattttgcgtgtacgacagaacacccagtgccctgtgtgctcagagcgaactgtggcgccggcgcttaatgatcttgcaaccactcaccctaaacttgccgagcaaattgcagatcctcaaccaagtggtgtgagcgccgcggccattatccccaccattagcaggggttcccatacgcaattaacatggcaatgttctaaaaatcatgaccaccaatgggtcgccacagtaaaggatcgtgttcgcggaacagactgccccacctgcgcaaatacaggaacttcacgcaaagaggctgaacttattgaggtcatccgtgcattattcccaaacactgatgtccagcaaggtgcgctcattaatggacgtaccggtaatcaaggtgcatcgccgtcaaccgatgtactcataccgtccaaaaatctcgctatcgagttcaacggcctgtactggcactctgagcttttcatcaaagataagcattatcatgcgaacaaatcagctctcgcagaacaagccggtgtgcagctcattcatgtgtgggaggacgactggaatcttcgccgcgacattgtgatccgcatgatcgcacacaagcttcatgcaacccataacctcagtgctgttttgcctaccgaaactactgactcacgtgtggcaaccaccgctttcgccgtacactcacactgtcggtggtctctggttcacgcgctgctgcattcttgaacagcaaccatattcagggt

SEQ ID NO: 1296 - protein, 224 aa, Corynebacterium glutamicum
VAPALNDLATTHPKLAEQIADPQPSGVSAAAIIPTISRGSHTQLTWQCSKNHDHQWVATVKDRVRGTDCPTCANTGTSRKEAELIEVIRALFPNTDVQQGALINGRTGNQGASPSTDVLIPSKNLAIEFNGLYWHSELFIKDKHYHANKSALAEQAGVQLIHVWEDDWNLRRDIVIRMIAHKLHATHNLSAVLPTETTDSRVATTAFAVHSHCRWSLVHALLHS

SEQ ID NO: 1297 - DNA, 439 bp, Corynebacterium glutamicum
  CDS (101)..(439): RXN02812
cgcaactggagctgccgactcccctgcgtttgccaccgttgaaggagcagaacttccagagggctacacctttgaagcagtagacagcgcagaagtacctgtgtgggctgttgccatcaacgctggaaacggtatctctgaagaccaagcccgcgccgcctctgatttcagtagcttcagcttcgacaccggcaacgccgataactccgcgcttgaaagtgttctcacccaagcttcaagcgaatccgcggcagaaactactgaggcgcaaccaagcgagaccccggtcgagcccgccgctgcttccccatccgataccatcatcaacctggatacctcatccaacatggatcgagttgttgacggcagccaggaaacctaccacacggttacttcccggactctggccaacctcgcccgcgaaactggtgcacagggc

SEQ ID NO: 1298 - protein, 113 aa, Corynebacterium glutamicum
VWAVAINAGNGISEDQARAASDFSSFSFDTGNADNSALESVLTQASSESAAETTEAQPSETPVEPAAASPSDTIINLDTSSNMDRVVDGSQETYHTVTSRTLANLARETGAQG

SEQ ID NO: 1299 - DNA, 567 bp, Corynebacterium glutamicum
  CDS (1)..(567): FRXA02812
gcttcaggcaccgacgcctcaacaatcacccttgaccaggtagctcttcccgttgccactaactccggagcatccgcagccgtagcgctggcgctggctgaaaccccagaagctgccgctgctgcgctcaaccgtgacgccgatgtcaccgcaactggagctgccgactcccctgcgtttgccaccgttgaaggagcagaacttccagagggctacacctttgaagcagtagacagcgcagaagtacctgtgtgggctgttgccatcaacgctggaaacggtatctctgaagaccaagcccgcgccgcctctgatttcagtagcttcagcttcgacaccggcaacgccgataactccgcgcttgaaagtgttctcacccaagcttcaagcgaatccgcggcagaaactactgaggcgcaaccaagcgagaccccggtcgagcccgccgctgcttccccatccgataccatcatcaacctggatacctcatccaacatggatcgagttgttgacggcagccaggaaacctaccacacggttacttcccggactctggccaacctcgcc

SEQ ID NO: 1300 - protein, 189 aa, Corynebacterium glutamicum
ASGTDASTITLDQVALPVATNSGASAAVALALAETPEAAAAALNRDADVTATGAADSPAFATVEGAELPEGYTFEAVDSAEVPVWAVAINAGNGISEDQARAASDFSSFSFDTGNADNSALESVLTQASSESAAETTEAQPSETPVEPAAASPSDTIINLDTSSNMDRVVDGSQETYHTVTSRTLANLA

SEQ ID NO: 1301 - DNA, 499 bp, Corynebacterium glutamicum
  CDS (101)..(499): RXN02817
aaaattcccacccccaaaactcccccacttcggttaaggaatcaggattctcacaaagttcaggcaggctcccgctacttttcagcgctaatcttggctcatgattttaggcgtacccattcaatatttgctctattcattgtggaattggattgtcgataccggttttgatgtagcaattatcctggtcttggcgtttttgattccacgtatcggccgactggccatgcgtattatcaagcgccgagtggagtctgcagccgatgcggacaccactaagaaccagctcgcgttcgccggcgttggcgtttatatcgcgcaaattgtggcgtttttcatgcttgccgtctccgcgatgcaggcttttggtttctctctcgcgggcgctgcgattccggcaaccattgcgtcagctgccattggccttggtgcgcagtcgattgttgcggacttcttggccggatttttcatcctgacggaaaagcaattcggcgtgggt

SEQ ID NO: 1302 - protein, 133 aa, Corynebacterium glutamicum
MILGVPIQYLLYSLWNWIVDTGFDVAIILVLAFLIPRIGRLAMRIIKRRVESAADADTTKNQLAFAGVGVYIAQIVAFFMLAVSAMQAFGFSLAGAAIPATIASAAIGLGAQSIVADFLAGFFILTEKQFGVG

SEQ ID NO: 1303 - DNA, 499 bp, Corynebacterium glutamicum; identical to SEQ ID NO: 1301
  CDS (101)..(499): FRXA02817

SEQ ID NO: 1304 - protein, 133 aa, Corynebacterium glutamicum; identical to SEQ ID NO: 1302

SEQ ID NO: 1305 - DNA, 606 bp, Corynebacterium glutamicum
  CDS (1)..(606): RXN02818
tcctattcccggaagtttttgacccaggtgtggattcgagacaatgtcggcgattataaaggccttaccgatacggcgttccgtaagaagctgcagcgcgatcttgcctacctgcgcagagttggcgttccgattgagcagttcacggtcacctcaggcatagctgaaggccagcaggcgtaccgtctggcccaggattcttataagctccccgaggtcgaattcaccccagatgaggccgccgtgctgggcatggcaggggagatgggccataatcaggaactcggcgccttcgcgcgttcggggtggaccaaattggcggccggcggcgcgcagcgtgatctgtccacgtccacagccttgaccaatgcgggcgatttaggttccttgtctgcaaaaaccctcgatgcgatcatcaaagcccgccaattgggcaagcaaatcagcttcgaataccggcgcgcccccaaagacgccccctcgcttcgacacatggatccttggggtctggtccctgagcgcgaccgcatctacctggtcggattcgacctcgaccgccaagaagcacgcaccttccgcatcacccgcgtccgcaacatcaaactc

SEQ ID NO: 1306 - protein, 202 aa, Corynebacterium glutamicum
SYSRKFLTQVWIRDNVGDYKGLTDTAFRKKLQRDLAYLRRVGVPIEQFTVTSGIAEGQQAYRLAQDSYKLPEVEFTPDEAAVLGMAGEMGHNQELGAFARSGWTKLAAGGAQRDLSTSTALTNAGDLGSLSAKTLDAIIKARQLGKQISFEYRRAPKDAPSLRHMDPWGLVPERDRIYLVGFDLDRQEARTFRITRVRNIKL

SEQ ID NO: 1307 - DNA, 606 bp, Corynebacterium glutamicum; identical to SEQ ID NO: 1305
  CDS (1)..(606): FRXA02818

SEQ ID NO: 1308 - protein, 202 aa, Corynebacterium glutamicum; identical to SEQ ID NO: 1306

SEQ ID NO: 1309 - DNA, 1962 bp, Corynebacterium glutamicum
  CDS (101)..(1939): RXN02825
tggcctgcccctgaaacttttacggctttcagagcgcagggcatcattttcttgtgtcgccaacacttgagaaaaattgcggaaaaggacactgctgttcatgaaacttgcacctcgtatgcggatgaggagccccaaaactttcgcggccctcgcctcacttgctttagtcataggtctcggccaggtaccgatcgcccaagctcaaaccgagtatcgaaccgcctccgacggttccctgaactggggatttaggcaatcgttccgcaattacatccaaaccggcgtggccaaaggttccatcacgcttggcgacggcgcatccgacaacggtggcaacttcgcattcaccccacgcaccaacggcaccaccgtgaccagcgattcccaaggcaccgtggaattcaacggctccgtgcacttcctcggacaccaggcagaggacaaatggatcctggacaccaccatgtctgacatcaaaatggtgttcaacggatcctccgcgcagctagttgtggatttggttgcccgcgaattcaagggcaccacctacgatgacatcggcgaatacatcatctccgacgacatcgtgcttgccgacgtctccctcaactccgccgccgacttctcccaagattccatcgacctgtccggcaccaccgacctcaccgcagctggcgcccaagctttcggaggattctacgaaaccggcgaagccctcgacccgaccggcggcagcctgaccatttcctccaccaccaccgcgccatcgaccagcacgacctccacctctgcctcaacttccggtggaaccgccgactgttcctccggcgcattgggtgttgtcaccaccggaaccaacgacggcatgctgggcaccatccaggaagtaaacaacaccttcgcgatttggaacaacctcatcgtcaacaccgagcgcatgttctgcaacattgataccctcaaggcgcgcttcgacacggatgattccagcgattcagcgacctctgcgacttctgggactactgcgtccaccggcaccaccgctgcaactaccgcgggaaccacgggtaccactggaactgccagcaccgcttccggaacttccggaacttccggaacctccggcaccgcagcaactgtcgctggcaccaccccaactgacaatggcgtttgcaccgcttccggatctttgggcgtgacccaagcatctgcgcagtggggtgtgaaggcgtccttccagaactacattcgcggatcgatcgccaacggtagctggactctcaacggcgttggttttgataatcagcagttccaattctctggaaattccggagcagtcgacgcggaaaacaagaccggcagcatcaatttccctggttccatccacttcacgggtcacggcggaatcttggacatgcagatcgcaaacattgagatcagcttcaacggcaactccggcgagctgattgcggatgtcgtttcctctgacatggatggaaattccaccaactacggtcgcactgtcgtgggcaccctgaacttctctgcgttgaatgtttctgcaacggaagcttccggttccgcttcggtgtccctgtcacagtcgggttcgcaggcgttcgctgatttctacaccccaggcacccagttggatccgatcagtttcagcgcaactttgggcggcgacgccagctgcgccaccggatccacctcgaccacaggcgctgctgccaccgcgaacactgacaacaccgaaggtgttgccggcgaggaatccaccacccccgctaaccaaaacagccagttccaaatccgccaggccgctgcagattccaccggactggataccaccaccacaatgttgctcatcctcgcggcgttcgttgtcgcaggtggctccatgactcgcttcaccgtcggcaacccgactggaaaataaggcttcacatgaataacgct

SEQ ID NO: 1310 - protein, 613 aa, Corynebacterium glutamicum
MKLAPRMRMRSPKTFAALASLALVIGLGQVPIAQAQTEYRTASDGSLNWGFRQSFRNYIQTGVAKGSITLGDGASDNGGNFAFTPRTNGTTVTSDSQGTVEFNGSVHFLGHQAEDKWILDTTMSDIKMVFNGSSAQLVVDLVAREFKGTTYDDIGEYIISDDIVLADVSLNSAADFSQDSIDLSGTTDLTAAGAQAFGGFYETGEALDPTGGSLTISSTTTAPSTSTTSTSASTSGGTADCSSGALGVVTTGTNDGMLGTIQEVNNTFAIWNNLIVNTERMFCNIDTLKARFDTDDSSDSATSATSGTTASTGTTAATTAGTTGTTGTASTASGTSGTSGTSGTAATVAGTTPTDNGVCTASGSLGVTQASAQWGVKASFQNYIRGSIANGSWTLNGVGFDNQQFQFSGNSGAVDAENKTGSINFPGSIHFTGHGGILDMQIANIEISFNGNSGELIADVVSSDMDGNSTNYGRTVVGTLNFSALNVSATEASGSASVSLSQSGSQAFADFYTPGTQLDPISFSATLGGDASCATGSTSTTGAAATANTDNTEGVAGEESTTPANQNSQFQIRQAAADSTGLDTTTTMLLILAAFVVAGGSMTRFTVGNPTGK

SEQ ID NO: 1311 - DNA, 538 bp, Corynebacterium glutamicum
  CDS (101)..(538): FRXA01322
tggcctgcccctgaaacttttacggctttcagagcgcagggcatcattttcttgtgtcgccaacacttgagaaaaattgcggaaaaggacactgctgttcatgaaacttgcacctcgtatgcggatgaggagccccaaaactttcgcggccctcgcctcacttgctttagtcataggtctcggccaggtaccgatcgcccaagctcaaaccgagtatcgaaccgcctccgacggttccctgaactggggatttaggcaatcgttccgcaattacatccaaaccggcgtggccaaaggttccatcacgcttggcgacggcgcatccgacaacggtggcaacttcgcattcaccccacgcaccaacggcaccaccgtgaccagcgattcccaaggcaccgtggaattcaacggctccgtgcacttcctcggacaccaggcagaggacaaatggatcctggacaccaccatgtctgacatcaaaatggtgttcaacggatcctccgcgcagctagttgtggatttggttgcccgcgaattc

SEQ ID NO: 1312 - protein, 146 aa, Corynebacterium glutamicum
MKLAPRMRMRSPKTFAALASLALVIGLGQVPIAQAQTEYRTASDGSLNWGFRQSFRNYIQTGVAKGSITLGDGASDNGGNFAFTPRTNGTTVTSDSQGTVEFNGSVHFLGHQAEDKWILDTTMSDIKMVFNGSSAQLVVDLVAREF

SEQ ID NO: 1313 - DNA, 528 bp, Corynebacterium glutamicum
  CDS (1)..(528): FRXA02824
ttctacgaaaccggcgaagccctcgacccgaccggcgacagcctgaccatttcctccaccaccaccgcgccatcgaccagcacgacctccacctctgcctcaacttccggtggaaccgccgactgttcctccggcgcattgggtgttgtcaccaccggaaccaacgacggcatgctgggcaccatccaggaagtaaacaacaccttcgcgatttggaacaacctcatcgtcaacaccgagcgcatgttctgcaacattgataccctcaaggcgcgcttcgacacggatgattccagcgattcagcgacctctgcgacttctgggactactgcgtccaccggcaccaccgctgcaactaccgcgggaaccacgggtaccactggaactgccagcaccgcttccggaacttccggaacttccggaacctccggcaccgcagcaactgtcgctggcaccaccccaactgacaatggcgtttgcaccgcttccggatctttgggcgtgacccaagcatctgcgcagtggggt

SEQ ID NO: 1314 - protein, 176 aa, Corynebacterium glutamicum
FYETGEALDPTGDSLTISSTTTAPSTSTTSTSASTSGGTADCSSGALGVVTTGTNDGMLGTIQEVNNTFAIWNNLIVNTERMFCNIDTLKARFDTDDSSDSATSATSGTTASTGTTAATTAGTTGTTGTASTASGTSGTSGTSGTAATVAGTTPTDNGVCTASGSLGVTQASAQWG

SEQ ID NO: 1315 - DNA, 407 bp, Corynebacterium glutamicum
  CDS (1)..(384): FRXA02825
aatgtttctgcaacggaagcttccggttccgcttcggtgtccctgtcacagtcgggttcgcaggcgttcgctgatttctacaccccaggcacccagttggatccgatcagtttcagcgcaactttgggcggcgacgccagctgcgccaccggatccacctcgaccacaggcgctgctgccaccgcgaacactgacaacaccgaaggtgttgccggcgaggaatccaccacccccgctaaccaaaacagccagttccaaatccgccaggccgctgcagattccaccggactggataccaccaccacaatgttgctcatcctcgcggcgttcgttgtcgcaggtggctccatgactcgcttcaccgtcggcaacccgactggaaaataaggcttcacatgaataacgct

SEQ ID NO: 1316 - protein, 128 aa, Corynebacterium glutamicum
NVSATEASGSASVSLSQSGSQAFADFYTPGTQLDPISFSATLGGDASCATGSTSTTGAAATANTDNTEGVAGEESTTPANQNSQFQIRQAAADSTGLDTTTTMLLILAAFVVAGGSMTRFTVGNPTGK

SEQ ID NO: 1317 - DNA, 528 bp, Corynebacterium glutamicum
  CDS (1)..(528): RXN02838
aacacgggcaagggcggggggctgacggtgccgctgggcgacgggcaggggcggtatatcgcgaagttcccctcgaccgcgtttgtgggggtgtcggagaacgaatttgccaatctggctttggccgaggcgatcgggatggaggtgcccgcgcgcgagttggtggggcgtgcgcagtttgaaggcgtgccccccgagtttgaggccatgaccgacgggttggttttgctggtgcggcggtttgatcgcgcgggcgatggcgtgcgcgtgcatatggaggatttcgcacaggtgttcggcctataccccgcgcgcaagtatgatggggcggccagtcacgatattgcggcggtgctgggcagtgcggtgtcgatcgcggcggggttggagttcgtgcggcggctggcgctctcggttgtgatgggcaacggcgatatgcatttgaagaactggtcgctgatctatcgcgggcggggcgatgtgccggcgttggcgcctgtgtattatatgatgtcgaccgtgacctat

SEQ ID NO: 1318 - protein, 176 aa, Corynebacterium glutamicum
NTGKGGGLTVPLGDGQGRYIAKFPSTAFVGVSENEFANLALAEAIGMEVPARELVGRAQFEGVPPEFEAMTDGLVLLVRRFDRAGDGVRVHMEDFAQVFGLYPARKYDGAASHDIAAVLGSAVSIAAGLEFVRRLALSVVMGNGDMHLKNWSLIYRGRGDVPALAPVYYMMSTVTY

SEQ ID NO: 1319 - DNA, 462 bp, Corynebacterium glutamicum
  CDS (1)..(462): FRXA02838
accgtgccgctgggcgacgggcaggggcggtatatcgcgaagatcccctcgaccgcgtttgtgggggtgtcggagaacaaatttgccaatctggctttggccgaggcgatcgggatggaggtgcccgcgcgcgagttggtggggcgtgcgcagtttgaaggcgtgccccccgagtttgaggccatgaccgacgggttggttttgctggtgcggcggtttgatcgcgcgggcgatggcgtgcgcgtgcatatggaggatttcgcacaggtgttcggcctataccccgcgcgcaagtatgatggggcggccagtcacgatattgcggcggtgctgggcagtgcggtgtcgatcgcggcggggttggagttcgtgcggcggctggcgctctctgttgtgatgggcaacggcgatatgcatttgaagaactggtcgctgatctatcacgggcggggcgatgtgccg

SEQ ID NO: 1320 - protein, 154 aa, Corynebacterium glutamicum
TVPLGDGQGRYIAKIPSTAFVGVSENKFANLALAEAIGMEVPARELVGRAQFEGVPPEFEAMTDGLVLLVRRFDRAGDGVRVHMEDFAQVFGLYPARKYDGAASHDIAAVLGSAVSIAAGLEFVRRLALSVVMGNGDMHLKNWSLIYHGRGDVP

SEQ ID NO: 1321 - DNA, 273 bp, Corynebacterium glutamicum
  CDS (101)..(250): RXN02840
aagtgaaatcaatcggcttttccagcagcagcactggtcgcgccagcgtgggtgttatggtgaaggcgaatacaccttcagcaccgctgagccggaagagatgacggtaatcagtggcgcgctgaatgtgttactgcctgacgcgaccgactggcaggtgtatgaagccggttcggtgtttaatgttcccggtcacagtgagtttcatctgcaagttgccgaacccacctcttatctgtgccgctatctgtaattcctcgccttccccttgaa

SEQ ID NO: 1322 - protein, 50 aa, Corynebacterium glutamicum
MTVISGALNVLLPDATDWQVYEAGSVFNVPGHSEFHLQVAEPTSYLCRYL

SEQ ID NO: 1323 - DNA, 273 bp, Corynebacterium glutamicum; identical to SEQ ID NO: 1321
  CDS (101)..(250): FRXA02840

SEQ ID NO: 1324 - protein, 50 aa, Corynebacterium glutamicum; identical to SEQ ID NO: 1322

SEQ ID NO: 1325 - DNA, 558 bp, Corynebacterium glutamicum
  CDS (101)..(535): RXN02841
ctcacataactttacgccaccccataccctttaacccctgcactgctcatccacaagcactgtgcaggggttgtgttttctaacaagaaaagagaccaccatgttcacagcttttaaaagcaatcctacgaccattaaaaagctggtttctgagctcattaatggcgacgatgcagcgctcaacgaactagagcgacacgtcactaatgaatcagtccgtgctcgcgaactccctaatgtccagtacaaagccactgcggggcgcaacttcgccatatccaagctggtccaaaatttgcgtcgcatcaacaaggcacaaaacaatccacgtggtgtgcccactcatgccaccgtgattctgcttaaggaagacggcagctacgacggtgaagaacagtggcgcattccagaaaaggcgatcactccgttcgacatgctacgttcgcctgacttcaaccacaacaggctgaagaaccggccgctcatggtcgagtcccaatacccctggggcgtccccggactcattaaaatgaactgatcaatccctgacacagccat

SEQ ID NO: 1326 - protein, 145 aa, Corynebacterium glutamicum
MFTAFKSNPTTIKKLVSELINGDDAALNELERHVTNESVRARELPNVQYKATAGRNFAISKLVQNLRRINKAQNNPRGVPTHATVILLKEDGSYDGEEQWRIPEKAITPFDMLRSPDFNHNRLKNRPLMVESQYPWGVPGLIKMN

SEQ ID NO: 1327 - DNA, 285 bp, Corynebacterium glutamicum
  CDS (7)..(285): FRXA02841
accaccatgttcgcagcttttaaaagcaatcttccgaccattaaaaagctggtttatgaggtcattaatggcgtcgatgcagcgctcaacgaactagagcgacacgtcactaatgaatcagtccgtgctcgcgaactccctaatgtccagtacaaagccactgcggggcgcaacttcgccatatccaagctggtccaaaatttgcgtcgcatcaacaaggcacaaaacaatccacgtggtgtgcccactcatgccaccgtgattctgcttaagggagacggcagc

SEQ ID NO: 1328 - protein, 93 aa, Corynebacterium glutamicum
MFAAFKSNLPTIKKLVYEVINGVDAALNELERHVTNESVRARELPNVQYKATAGRNFAISKLVQNLRRINKAQNNPRGVPTHATVILLKGDGS

SEQ ID NO: 1329 - DNA, 873 bp, Corynebacterium glutamicum
  CDS (101)..(850): RXN02846
tacaagcgctgaacgttgagtttgagtttggtccattgaggggtaaaggcttacctctcgactaggtggggtgggcgtagagcgcctattctgattgatcgtgttaaccatcgctattgtacttctcgcgtcagtcctcatcggtgctcttctccaacgcatgacaggattgggcgtcggtctagttaccggcccagtcctgacttctttgttagggccgctagcaggcgtgaccatggtgaatggtctgtccatcatcaacgcggtgaataatgcgtggtcggtgcgcaaacgcactgactgggccaaattccgaattcttgccggcgctttggtgcttggttctgttcctgctgttgcagtggtgtatttccttaacggaccatggctgttgattttcgttggtgcgatggtgctgctcgcgttgggtgtttccctgttcccaacagagaaattcgcactcaagcaagaagctaaactgcctatggtcatcttcggcatgattggtggattcatgtccactgttgcaggcatcgcagggccatccctgactgtttatgcgcgcctgagccgctgggattaccgcgactttgtggccaccttgcacccagttctactcgtggccaacaccgtatcgttcctgctcaaggttatcttgatcggtggactcgatttcggtggcgcacccgcatggctctggatcggtgccgtagcgatgatctttgtcggtgcttggttgggtgaaatcgtcaacgctaaggtgtccaccccaatggccaagcgcatcgctacgctcctggcagcagctggtgccgcagtggtgttgttccgaggcatcatggaattggtttagcggtcttaattggtgggaag

SEQ ID NO: 1330 - protein, 250 aa, Corynebacterium glutamicum
VLTIAIVLLASVLIGALLQRMTGLGVGLVTGPVLTSLLGPLAGVTMVNGLSIINAVNNAWSVRKRTDWAKFRILAGALVLGSVPAVAVVYFLNGPWLLIFVGAMVLLALGVSLFPTEKFALKQEAKLPMVIFGMIGGFMSTVAGIAGPSLTVYARLSRWDYRDFVATLHPVLLVANTVSFLLKVILIGGLDFGGAPAWLWIGAVAMIFVGAWLGEIVNAKVSTPMAKRIATLLAAAGAAVVLFRGIMELV

SEQ ID NO: 1331 - DNA, 573 bp, Corynebacterium glutamicum
  CDS (1)..(573): FRXA02846
gtgaatggtctgtccatcatcaacgcggtgaataatgcgtggtcggtgcgcaaacgcactgactgggccaaattccgaattcttgccggcgctttggtgcttggttctgttcctgctgttgcagtggtgtatttccttaacggaccatggctgttgattttcgttggtgcgatggtgctgctcgcgttgggtgtttccctgttcccaacagagaaattcgcactcaagcaagaagctaaactgcctatggtcatcttcggcatgattggtggattcatgtccactgttgcaggcatcgcagggccatccctgactgtttatgcgcgcctgagccgctgggattaccgagactttgtggccaccttgcacccagttctactcgtggccaacaccgtatcgttcctgctcaaggttatcttgatcggtggactcgatttcggtggcgcacccgcatggctctggatcggtgccgtagcgatgatctttgtcggtgcttggttgggtgaaatcgtcaacgctaaggtgtccaccccaatggccaagcgcatcgctacgctcctggcagcagctggt

SEQ ID NO: 1332 - protein, 191 aa, Corynebacterium glutamicum
VNGLSIINAVNNAWSVRKRTDWAKFRILAGALVLGSVPAVAVVYFLNGPWLLIFVGAMVLLALGVSLFPTEKFALKQEAKLPMVIFGMIGGFMSTVAGIAGPSLTVYARLSRWDYRDFVATLHPVLLVANTVSFLLKVILIGGLDFGGAPAWLWIGAVAMIFVGAWLGEIVNAKVSTPMAKRIATLLAAAG

SEQ ID NO: 1333 - DNA, 1135 bp, Corynebacterium glutamicum
  CDS (47)..(1135): RXN02847
atatcgcagcagcctcgatggtcaacgcccatatgatgggaagttgttggcgctaaccgccagaggctttctcaattctgaaagaagccagacaaggtggaaaacccacttcaccacccagaaagttccacgctccggctacagatatgacctcgatgggctccgcggcatcgcgatcgccttcgtagttttgttccatgttttcgtcggaaaagtctccggcggtgtggatgtcttcctgctgctgtctggctatttcttcttagggtcgcaattgcgttatgcagatcgtccagattcttccatcaacccctggtggccgatttggcgcacgctacgcagattacttcctgcgttagtgctggtgttgggcgtttccatggtcctcatcttggcgtgggtgcccagactgcaaccaatagaaatagccaaccaagcagtagccagcctcttctatgtccaaaactgggagctcgcatcccaaggtgctgcctacggagcagcctctgcagaagtcagtcctttccagcacttgtggtccatggctgtgcaagggcagttctacctctttgccatcttgttgagcatggcgatcatcctgattcgtcgataccgccccgaatactccgcagtgcgactagcgactcctgtgctggcagtgctcacatccgtatcatttttcagtgcaatcctgtggcatttcattgatcaatcagtcaactactattccaccttcaccaggttctgggagctcggccttggtgcactattggtgctgcatgcgcctcgaattttgatttctgcgaagactaaatcaatactcgcagccgtcggtttgtttatggtgctatccactggattcttcatggatggcgcagagactttccctggattccccgcgctgtatcccatcttgggtgcttgcttagtcatccttggcgacggtaaaatctcggtctttctctcccgaaaatggatgctttggctcggcgatatcgcctacccgctctacttgtggcactggcctctgctgatcattttcaccgctttgttcaaccaagaagagccatccatctggctgggtatcgccgtgattatgctgtcccttggcttggcgcagctgactaacaaatac

SEQ ID NO: 1334 - protein, 363 aa, Corynebacterium glutamicum
LALTARGFLNSERSQTRWKTHFTTQKVPRSGYRYDLDGLRGIAIAFVVLFHVFVGKVSGGVDVFLLLSGYFFLGSQLRYADRPDSSINPWWPIWRTLRRLLPALVLVLGVSMVLILAWVPRLQPIEIANQAVASLFYVQNWELASQGAAYGAASAEVSPFQHLWSMAVQGQFYLFAILLSMAIILIRRYRPEYSAVRLATPVLAVLTSVSFFSAILWHFIDQSVNYYSTFTRFWELGLGALLVLHAPRILISAKTKSILAAVGLFMVLSTGFFMDGAETFPGFPALYPILGACLVILGDGKISVFLSRKWMLWLGDIAYPLYLWHWPLLIIFTALFNQEEPSIWLGIAVIMLSLGLAQLTNKY

SEQ ID NO: 1335 - DNA, 694 bp, Corynebacterium glutamicum
  CDS (101)..(694): FRXA02847
ccagcctcttctatgtccaaaaactgggagctcgcatcccaagggtgctgcctacggagcagcctctgcagaagtcagtcctttccagcacttgtggtccatggctgtgcaagggcagttctacctctttgccatcttgttgagcatggcgatcatcctgattcgtcgataccgccccgaatactccgcagtgcgactagcgactcctgtgctggcagtgctcacatccgtatcatttttcagtgcaatcctgtggcatttcattgatcaatcagtcaactactattccaccttcaccaggttctgggagctcggccttggtgcactattggtgctgcatgcgcctcgaattttgatttctgcgaagactaaatcaatactcgcagccgtcggtttgtttatggtgctatccactggattcttcatggatggcgcagagactttccctggattccccgcgctgtatcccatcttgggtgcttgcttagtcatccttggcgacggtaaaatctcggtctttctctcccgaaaatggatgctttggctcggcgatatcgcctacccgctctacttgtggcactggcctctgctgatcattttcaccgctttgttcaaccaagaagagccatccatctggctgggtatcgccgtgattatgctgtcccttggcttggcgcagctgactaacaaatac

SEQ ID NO: 1336 - protein, 198 aa, Corynebacterium glutamicum
MAVQGQFYLFAILLSMAIILIRRYRPEYSAVRLATPVLAVLTSVSFFSAILWHFIDQSVNYYSTFTRFWELGLGALLVLHAPRILISAKTKSILAAVGLFMVLSTGFFMDGAETFPGFPALYPILGACLVILGDGKISVFLSRKWMLWLGDIAYPLYLWHWPLLIIFTALFNQEEPSIWLGIAVIMLSLGLAQLTNKY

SEQ ID NO: 1337 - DNA, 305 bp, Corynebacterium glutamicum
  CDS (1)..(282): RXN02849
tccccataccccgtcatgatcagcacctctgccgacgcctcaaacgtgaccgtgcgcatcatgggtgtggacaccacctccgtggaatccatcaacaacggacgttggtccaccacccagcccaacacagttcgagtatcgggttcagattgtgtgccatcaaccggtgcaccaggatttaccacctcagacacccgaatcatcagcgatctttctggcaacgaaatcaccagagaaaccgtcaccacggtttacgatccttcaccaaacgtggtctgctcctaaaacaaaatgccccaccagat

SEQ ID NO: 1338 - protein, 94 aa, Corynebacterium glutamicum
SPYPVMISTSADASNVTVRIMGVDTTSVESINNGRWSTTQPNTVRVSGSDCVPSTGAPGFTTSDTRIISDLSGNEITRETVTTVYDPSPNVVCS

SEQ ID NO: 1339 - DNA, 305 bp, Corynebacterium glutamicum
  CDS (1)..(282): FRXA02849
tccccataccccgtcatgatcagcacctctgccgacgcctcaaacgtgaccgtgcgcatcatgggtgtggacaccacctccgtggaatccatcaacaacggacgttggtccaccacccagcccaacacagttcgagtatcgggttcagattgtgtgccatcaaccggtgcaccaggatttaccacctcagacacccgaatcatcagcgatctttctggcaacgaaatcaccagagaacccgtcaccacggtttacgatccttcaccaaacgtggtctgctcctaaaacaaaatgccccaccagat

SEQ ID NO: 1340 - protein, 94 aa, Corynebacterium glutamicum
SPYPVMISTSADASNVTVRIMGVDTTSVESINNGRWSTTQPNTVRVSGSDCVPSTGAPGFTTSDTRIISDLSGNEITREPVTTVYDPSPNVVCS

SEQ ID NO: 1341 - DNA, 582 bp, Corynebacterium glutamicum
  CDS (101)..(559): RXN02911
accgcatacattaacgtgttgatcattgccctagtatgcgcagtagcggctgctctgatcagcagttaccttttccgcggaaatccgaagggagccaataatgcgcactagtaaaaaagagatgattctgcgcacggccatcgattatatcggcgagtacagcctcgagacgctgagttacgattcgctcgccgaggcgaccggtctgtccaagtcgggcttgatttatcatttccccagccgccatgcgctgcttttaggcatgcacgagttgcttgccgacgactgggacaaggaattgcgcgacataacccgcgacccagaggatccacttgagcgattgcgcgccgtcgtggttacgcttgctgaaaacgtttcgcgccccgagctggttttgcttatggacgccccctcccacccgggatttcttaacgcctggcgcactgtaaatcatcaatggatccccgacaccgatgatctggaaaacgatgcccacaaacgcgccgtctactctggtgcagctcgcagccgatggcctcttcgtgcacgattacattcatgatgatgtcctcagcaagtcca

SEQ ID NO: 1342 - protein, 153 aa, Corynebacterium glutamicum
MRTSKKEMILRTAIDYIGEYSLETLSYDSLAEATGLSKSGLIYHFPSRHALLLGMHELLADDWDKELRDITRDPEDPLERLRAVVVTLAENVSRPELVLLMDAPSHPGFLNAWRTVNHQWIPDTDDLENDAHKRAVYSGAARSRWPLRARLHS

SEQ ID NO: 1343 - DNA, 666 bp, Corynebacterium glutamicum
  CDS (101)..(643): RXN02914
tgtggatcgcagcaattgcatcccctgggccagaccttttcagatcatcaggctaagtgccaaaaaccgccgtgatggcgtactgactgccgtaggcatcatggtgggaaactccatctggatcatagccagcctccttgggctctcggcactgatctccacgtatccagcaattttgaacctgttgcagctcgtcggtggcggttatttgacctggatgggcatcggggcggtgaggtcatggtggacgaaacgctccacacagcaagctgcagcggattctcaagctgtagagaatacgttggtgacagccacggctgcatctgtcggagtgtggccagctattcgatctggcattgctaccaacttgtccaaccccaaagctgtgctgttttttggttccgttttcgcccaatttgttagacctgacatgggaatcgggtggagtattttcattggagtcttcctcaccctcactggcctgctgtggtttgtggggttcgccgtcttggtccgcaaactagccgctggcctcacccgaaatggagccatcatcgacctgctaacgggggtgattttcatcgggctgggaatgttcatgatcttcgagggggttgtaggaatcggtggcagggtagtgggttagccccgcccccaggacgtcac

SEQ ID NO: 1344 - protein, 181 aa, Corynebacterium glutamicum
MVGNSIWIIASLLGLSALISTYPAILNLLQLVGGGYLTWMGIGAVRSWWTKRSTQQAAADSQAVENTLVTATAASVGVWPAIRSGIATNLSNPKAVLFFGSVFAQFVRPDMGIGWSIFIGVFLTLTGLLWFVGFAVLVRKLAAGLTRNGAIIDLLTGVIFIGLGMFMIFEGVVGIGGRVVG

SEQ ID NO: 1345 - DNA, 594 bp, Corynebacterium glutamicum
  CDS (101)..(571): RXN02921
tggaaaactgggaagggttgacgttgcggaatctctccgcagcgtcggttcggaccctaaaaaagggtgaggaaccacatgagctgttttaaggaattttgtgtctgcacttgaagagtcgatccgcatcgcgaccatcgcggcgaaagcagcggatgaaaagaaggccgatgacatcgctgtcatcgatgtctctgacatgatcgcaatcaccgattgctttgttgttgcatctgctgacaatgagcgccaggtgggcgccattgttgaggagatcgaagatgagatgaccaaggctggtttcgagcctaagcgccgtgaaggcaaccgcgaaaaccgttgggttctccttgactacggattggttgttatccacgttcagcgacaggcagagcgcgagttctacggactggatcgtctgtaccgcgactgcccactcattgaaattgaaggacttgaaaccttcaagcgtgaatcctcctggtctgatgaggcggatatccgcaacatcgacagcattgatgaactcccacctttgccagctgaatacgagcctggctacgaggacgattaagaggtagtcctgtgactcgt

SEQ ID NO: 1346 - protein, 157 aa, Corynebacterium glutamicum
VSALEESIRIATIAAKAADEKKADDIAVIDVSDMIAITDCFVVASADNERQVGAIVEEIEDEMTKAGFEPKRREGNRENRWVLLDYGLVVIHVQRQAEREFYGLDRLYRDCPLIEIEGLETFKRESSWSDEADIRNIDSIDELPPLPAEYEPGYEDD

SEQ ID NO: 1347 - DNA, 672 bp, Corynebacterium glutamicum
  CDS (101)..(649): RXN02924
ctaggcaggtgtgcgatcaaaccacactgtcagaatcaaatctgctggacgctatgccagcggattgttgatcacgaaaaagcatgtcacagacacctttgtgccttctgtagcatccatctcagagcgcgccacgtttattctcaccgccgatcactttttgcgcagctgctcgaaagtaatttatgtccggggcgaaaatttcaccgccacagcaaccaccagcctgtctgtatttggcacagatctgggtttgatcaaattagacggcaaagcccccaccatgccacttccacttttcgcagataagccacttcgcgtgggcatgaaaaccaccacgttcggattcggcggtctgccatcagccaccgttgctaaagaaatccacgggcgcgttatctctgccatcccccatggcgtatcaagaaaccgcatcacccgagtccatcacggtgccttgatctttaactccccagaaaaggcagtaaagggagactccggcggacctgtgctggttaatggacgagtagccggaatccaatcaatgatctctgaccccggtggatttaacaccggggtcgccactgccgcatcccttatccagcacatgcctgccctagctcaagcgcttgaactgctcgaacatagctagctcgctaggaaccgatcgcc

SEQ ID NO: 1348 - protein, 183 aa, Corynebacterium glutamicum
VPSVASISERATFILTADHFLRSCSKVIYVRGENFTATATTSLSVFGTDLGLIKLDGKAPTMPLPLFADKPLRVGMKTTTFGFGGLPSATVAKEIHGRVISAIPHGVSRNRITRVHHGALIFNSPEKAVKGDSGGPVLVNGRVAGIQSMISDPGGFNTGVATAASLIQHMPALAQALELLEHS

SEQ ID NO: 1349 - DNA, 591 bp, Corynebacterium glutamicum
  CDS (101)..(568): RXN02927
tccgcagttgggcctgcttgacgccagatctcaagtgtaagtttcattacttgtagttccttgtctgcagtgggacagattcgaagaacagtggttctgcgtggcagacgaaggttccattctcgcctggttcccatgcggagacgaagcaccagttttggtcgtcacgttgtgcttcgccatcttcggagaggtggtcgtcgcggaagtgagcgccacaggactcgtcgcggtcgagggcgtcgacacacatgagttcgccgaggtcgatgtagtcggctacgcgtgctgcgtattcgagaacctggttcatctcatcggtgctgccggtgatgcgcatgttcttccagaagtcatcgcggagggcacggatcttgttgatgccatcctggaggtcttctacgtttcgggaaacgccacaggagaagtacaggatatcgccaagctggcggtggtagtactcaggtccgtgaacgttgtcaccgacccactctgggcggttgcccatgaggcggtcaatgcgagcctgtgcacgcgcaatcgctgcctgtgcttctggtgcatcctctgacagacgctcggagccaagca

SEQ ID NO: 1350 - protein, 156 aa, Corynebacterium glutamicum
VADEGSILAWFPCGDEAPVLVVTLCFAIFGEVVVAEVSATGLVAVEGVDTHEFAEVDVVGYACCVFENLVHLIGAAGDAHVLPEVIAEGTDLVDAILEVFYVSGNATGEVQDIAKLAVVVLRSVNVVTDPLWAVAHEAVNASLCTRNRCLCFWCIL

SEQ ID NO: 1351 - DNA, 816 bp, Corynebacterium glutamicum
  CDS (101)..(793): RXN02928
ggtttgcaccgtggtaggtccaggatgcttcgcctgcgcagaacagacctgggagtgacgtcatttcgttgaagtcagtccagaggccacccatggtgaagtggcaggtcggtgcaatacgcattgggctggagtatgggtcctcgccaattgcctcttcgtacatggtgaagaggttggagtaacgctcgcggatggtgtcctgtccgaggcgctcggtggcgtcgcggaagtccaggtatgcagcgttgttcagaggtccaacaccgagaccagcattgatctgctgggagatcgcacgggaagcaacgtcacgtgggacgaggttaccgaatgctgggtagcggcgctccaggaagtagtcgcgctcatcctcagggatggtgtttggatcgcggttatcgttcggttccttaggggaccagatgcggccgtcgttacgcagcgactcggacatcagaatggtcttggactgccaggtggagttcacaggcaggccggttgggtggaactggatgaacgatggggacgcgaagtatgcgccggcttcgtatgcacgcatgatggccgaggcgttggagttcttggccagggtggacatgtggtacacgttgccgtagccaccggttgccaggataacggcatggccggtgtgtgcggtgagctcgccggtgatcaggttgcgcatgatcaggccttcgcagcgcttttcaccgttacgttcggtgacaatgacgtcaaccatttcgttatgggtgaagatttctacggagccgaggtggatctggcgctgtagtgcggatgcggtggagaact

SEQ ID NO: 1352 - protein, 231 aa, Corynebacterium glutamicum
VAGRCNTHWAGVWVLANCLFVHGEEVGVTLADGVLSEALGGVAEVQVCSVVQRSNTETSIDLLGDRTGSNVTWDEVTECWVAALQEVVALILRDGVWIAVIVRFLRGPDAAVVTQRLGHQNGLGLPGGVHRQAGWVELDERWGREVCAGFVCTHDGRGVGVLGQGGHVVHVAVATGCQDNGMAGVCGELAGDQVAHDQAFAALFTVTFGDNDVNHFVMGEDFYGAEVDLAL

SEQ ID NO: 1353 - DNA, 348 bp, Corynebacterium glutamicum
  CDS (101)..(325): RXN02931
gatgggtgcagaaattgaattgaaagaatccgggcacatgtgggtggaatccccgagtgactagtgcggtgtaagagcactagactgttcaactatgagcatgcaaccatacccccgcaacccaatcgaaaaacgtaagcaagaagtacgcaagaactcccgcaacgcagttgtcagtgttggcggtggcatcgtaggcggtgcggctctgtggctagtgttcggctctgcattctttatgggacttggattgatcatcgccgtggtcggcggtttttattactacaacaaggtccaaaagatcattaacgaaaaagaccgttactagttagaaatctatgtcagaca

SEQ ID NO: 1354 - protein, 75 aa, Corynebacterium glutamicum
MQPYPRNPIEKRKQEVRKNSRNAVVSVGGGIVGGAALWLVFGSAFFMGLGLIIAVVGGFYYYNKVQKIINEKDRY

SEQ ID NO: 1355 - DNA, 1095 bp, Corynebacterium glutamicum
  CDS (101)..(1072): RXN02932
cactactgcgttaaggtatgaaagttcgcacaccagcgatttaattctgtgcccaccactagcacgaccatttcagttttaactttcttggagttttctagtgtccaaaacagaagaaggccgttcagcggccataattatttacgcgtttccaactttcattctgctgggcgcgatcattgcgtttatcttcccggaaccattcattccgctgacaaactacattaatatcttcctcacgatcatcatgttcaccatgggtttgaccttgacggtgcccgattttcagatggtgcttaaacgtccactgcctatcttgatcggtgtagtagcgcagtttgtcatcatgccattcctggcgatcgtggttgcgaaaatgttcaacctcaacccagcactcgccgttggccttctcatgctgggatccgttccgggtggcacctcctccaatgtgattgcgtttctcgcccgaggagatgtcgcgctatcggtcaccatgacctctgtgtccaccattgtttccccaatcatgacgcctttcctcatgctcatgctggcaggtactgaaaccgccgtcgatggtggaggcatggcgtggactttggtacaaacagtgctgctgcctgtgatcatcggcctagttctgcgtgtcttcttgaacaagtggatcgacaagattttgccgatccttccttatctctccatcctcggtatcggtggcgtggtgttcggcgcagtcgcagccaacgcggaacgactcgtgtctgtcggactcatcgtgttcgttgcagttatcgtgcacaacgtacttggatacgttgtgggatacctcaccggccgtgtattcaaattcccagaagcagcaaaccgcaccatggcgattgaaatcggaacccaatccgcaggcctcgcatcgggaatggcaggacgattcttcaccccagaagcagcccttccaggtgctgtcgctgccttggtccacaacatcaccggcgcagtttatgttgggctggtacgaaacaggcctttgactaaggcatcaaggaagaaggaatccgtcgcggtttccagctaacttatttgctgcccgttaga

SEQ ID NO: 1356 - protein, 324 aa, Corynebacterium glutamicum
VSKTEEGRSAAIIIYAFPTFILLGAIIAFIFPEPFIPLTNYINIFLTIIMFTMGLTLTVPDFQMVLKRPLPILIGVVAQFVIMPFLAIVVAKMFNLNPALAVGLLMLGSVPGGTSSNVIAFLARGDVALSVTMTSVSTIVSPIMTPFLMLMLAGTETAVDGGGMAWTLVQTVLLPVIIGLVLRVFLNKWIDKILPILPYLSILGIGGVVFGAVAANAERLVSVGLIVFVAVIVHNVLGYVVGYLTGRVFKFPEAANRTMAIEIGTQSAGLASGMAGRFFTPEAALPGAVAALVHNITGAVYVGLVRNRPLTKASRKKESVAVSS

SEQ ID NO: 1357 - DNA, 429 bp, Corynebacterium glutamicum
  CDS (101)..(406): RXN02934
tggatgggccggtggcggtgaccatggtagatgcggattcaagctgccaggcgcgctcattgagtggctggccgtagtagatttctacaactccgccggcgtgggtgcagacgaattcgatttcatctttgagattgatgcgccagaagccggattcgcgctggtcgacgccggtggggtttccttcttcgtcgagtttccacatgcgggattcgaaggagaggtagttttcaccgtcgtgggcgaaggtgatttgctggccgaatgcgtattgtccgtcttctgcggtgtcggcttggccttcgccgcgccagacgccgacgagagggaggagcgcgaggagtccgtcgtggaggttggggccttcgcggaggttagcggtgtcgtcagggataggaaggtcacctaggcctgggatgttgcggtgag

SEQ ID NO: 1358 - protein, 102 aa, Corynebacterium glutamicum
VGADEFDFIFEIDAPEAGFALVDAGGVSFFVEFPHAGFEGEVVFTVVGEGDLLAECVLSVFCGVGLAFAAPDADEREEREESVVEVGAFAEVSGVVRDRKVT

SEQ ID NO: 1359 - DNA, 321 bp, Corynebacterium glutamicum
  CDS (101)..(298): RXN02936
accaagttcagacagctctgggttggacctaccggagtaaaggcgtgccactgacatagcagtttggccgtggcgaagcaacaagaaacgagtgggatctgtggttgcgccgttccagttggtgggtttggtttcggtgcagttgaggtcttctttctctgagcccgcaaccgaagaagcagaagatacagaagcagaatcccctacaacacctaccggcttacctgccgctgcagcatccatcgccacgttggacaatgcgtcagctcgtttgtttttctcacgcggaatccacgtataagaaacggacccgatttcgga

SEQ ID NO: 1360 - protein, 66 aa, Corynebacterium glutamicum
VVAPFQLVGLVSVQLRSSFSEPATEEAEDTEAESPTTPTGLPAAAASIATLDNASARLFFSRGIHV

SEQ ID NO: 1361 - DNA, 1725 bp, Corynebacterium glutamicum
  CDS (101)..(1702): RXN02939
cttcgaagaagacgatatcccctacgaagtcgacgtggatgacttatttatcctcggtggcttagacaacttcataaatccccttggagtgattgagataatgaatctccactccttagagattcgccaaatttcatccggcacaatttcagaacgaaaaacttggatctttcccactgctgctcgctcattcaatcaaaatctagtacacccgcaaagcattgaaatcgatgcacaaaccggcgttattttggctatggaaaaccgactacaacgtaccgaagttgaatcagtagagtacccaacggatcttcctaatcctgcatggacaggtccagccatttcttggccactaaaagacccatcaatcgatttccctgacccgctcccccacagcatttccgaattaccacctcaatccgataatcctcggcatttgcgagtatccatcagcttagatgcagtggaaggtgcttttccgcgctaccggatcggagattcaatacgtattccgcttgtctttgcccgggacacgcccttcatgtccggcttagaaacaacacgtcgcgcctggattgaggcggccacggaaatggacatccataacacatggcccataatcctcaccggtgacggctggactgcactctctcattcagacaaaccaatacgccacgaagccgagttaaagggatggtttttccacagtttgttcggcagtgaaatgcccttgactgatctgaagattgaacgaatctacggaggcctgggtactttcgacagcggagccacccggtggcaagaactcacagacacagatgatgcctacacagaaaatggcagctggctgttggaagttatcgtcgatgccacccttgacggtgcaattccaccaccacttcagccacaacagtttgaagcatccatcactcacatcgtcgatgagcaactatgggtccttgggcagatgcttccagttctacgatgctgggatcttgaaaccggaaaatacctggggcaaacctatgtacctatttcggtttctcatagttctcggcttcagttttcggaagggttgattcacgattatgaaaatgcctggtcgctgaatcctggggtgcgcatgcttgcggagccacagccgtggatagagcctgtcattgaactcgacgttccagcgccatgggaattacaagaaagcttccccgatgggctttactccctaactgatggagagcaaacagcactgggtcgaagcactccagcaggacaattggaaatctgtgtaatcagcaatgacggatccaggatcttaaacgcaggccgagtagaagacctgtactttgtgcaattctggggcatgaccgtctttttgaattccaactttcaagtgcaaagtgccgaagaacatcagcttggtgcgaaacgtgaacgctggattacacaagaaggcgtagctgccaagttcaccgaagaagatgaaatcgtattcctcgatcagatatctgaaagcgaaataaccaggtggaaaacaccagaaggatacttcactgaggtcagaattctgtcaccaaaccacttcaacatactggttactccgcctactggttctgactatctcaaaccagtaccttcctctgtctcagtgtttagagacggtcaatggagcaacattaaattcgaggacgtctctgtagaaatctagggctttcgacgcttgagccc

SEQ ID NO: 1362 - protein, 534 aa, Corynebacterium glutamicum
MNLHSLEIRQISSGTISERKTWIFPTAARSFNQNLVHPQSIEIDAQTGVILAMENRLQRTEVESVEYPTDLPNPAWTGPAISWPLKDPSIDFPDPLPHSISELPPQSDNPRHLRVSISLDAVEGAFPRYRIGDSIRIPLVFARDTPFMSGLETTRRAWIEAATEMDIHNTWPIILTGDGWTALSHSDKPIRHEAELKGWFFHSLFGSEMPLTDLKIERIYGGLGTFDSGATRWQELTDTDDAYTENGSWLLEVIVDATLDGAIPPPLQPQQFEASITHIVDEQLWVLGQMLPVLRCWDLETGKYLGQTYVPISVSHSSRLQFSEGLIHDYENAWSLNPGVRMLAEPQPWIEPVIELDVPAPWELQESFPDGLYSLTDGEQTALGRSTPAGQLEICVISNDGSRILNAGRVEDLYFVQFWGMTVFLNSNFQVQSAEEHQLGAKRERWITQEGVAAKFTEEDEIVFLDQISESEITRWKTPEGYFTEVRILSPNHFNILVTPPTGSDYLKPVPSSVSVFRDGQWSNIKFEDVSVEI

SEQ ID NO: 1363 - DNA, 1243 bp, Corynebacterium glutamicum
  CDS (101)..(1243): FRXA01383
cttcgaagaagacgatatcccctacgaagtcgacgtggatgacttatttatcctcggtggcttagacaacttcataaatccccttggagtgattgagataatgaatctccactccttagagattcgccaaatttcatccggcacaatttcagaacgaaaaacttggatctttcccactgctgctcgctcattcaatcaaaatctagtacacccgcaaagcattgaaatcgatgcacaaaccggcgttattttggctatggaaaaccgactacaacgtaccgaagttgaatcagtagagtacccaacggatcttcctaatcctgcatggacaggtccagccatttcttggccactaaaagacccatcaatcgatttccctgacccgctcccccacagcatttccgaattaccacctcaatccgataatcctcggcatttgcgagtatccatcagcttagatgcagtggaaggtgcttttccgcgctaccggatcggagattcaatacgtattccgcttgtctttgcccgggacacgcccttcatgtccggcttagaaacaacacgtcgcgcctggattgaggcggccacggaaatggacatccataacacatggcccataatcctcaccggtgacggctggactgcactctctcattcagacaaaccaatacgccacgaagccgagttaaagggatggtttttccacagtttgttcggcagtgaaatgcccttgactgatctgaagattgaacgaatctacggaggcctgggtactttcgacagcggagccacccggtggcaagaactcacagacacagatgatgcctacacagaaaatggcagctggctgttggaagttatcgtcgatgccacccttgacggtgcaattccaccaccacttcagccacaacagtttgaagcatccatcactcacatcgtcgatgagcaactatgggtccttgggcagatgcttccagttctacgatgctgggatcttgaaaccggaaaatacctggggcaaacctatgtacctatttcggtttctcatagttctcggcttcagttttcggaagggttgattcacgattatgaaaatgcctggtcgctgaatcctggggtgcgcatgcttgcggagccacagccgtggatagagcctgtcattgaactcgacgttccagcgccatgggaattacaagaaagcttccccgatgggctttacttcctaactgatggcaagcaaaca

SEQ ID NO: 1364 - protein, 381 aa, Corynebacterium glutamicum
MNLHSLEIRQISSGTISERKTWIFPTAARSFNQNLVHPQSIEIDAQTGVILAMENRLQRTEVESVEYPTDLPNPAWTGPAISWPLKDPSIDFPDPLPHSISELPPQSDNPRHLRVSISLDAVEGAFPRYRIGDSIRIPLVFARDTPFMSGLETTRRAWIEAATEMDIHNTWPIILTGDGWTALSHSDKPIRHEAELKGWFFHSLFGSEMPLTDLKIERIYGGLGTFDSGATRWQELTDTDDAYTENGSWLLEVIVDATLDGAIPPPLQPQQFEASITHIVDEQLWVLGQMLPVLRCWDLETGKYLGQTYVPISVSHSSRLQFSEGLIHDYENAWSLNPGVRMLAEPQPWIEPVIELDVPAPWELQESFPDGLYFLTDGKQT

SEQ ID NO: 1365 - DNA, 447 bp, Corynebacterium glutamicum
  CDS (101)..(424): RXN02950
tccgccctatttcagcaatgtttaataccggtggaatcgtttttattaggatgggtggatacctatctttagtgagccgtactagcgagaaagctgccccatgactgttttcaatgttctccatgacgcacccgcaccacagccggataaaaaccgccccggtgtcaaacgtctcctccaaggtgatggcgcaaacctcatcgccttcactttcagccctggacagtcacttcccgaccaccgcgccgcacatcccatcaccgtgaccgcattttctggccagctcaccttcagctatggcgaggaaacctttgagctctcccccggtgtgacagtgcacttggaagcaggagttacccaccgcgtggactgcccgccagaagcaccaggcgatgcaagtaatgctgttaactatgctcactggtgaaaaacactcagtcaaccagg

SEQ ID NO: 1366 - protein, 108 aa, Corynebacterium glutamicum
MTVFNVLHDAPAPQPDKNRPGVKRLLQGDGANLIAFTFSPGQSLPDHRAAHPITVTAFSGQLTFSYGEETFELSPGVTVHLEAGVTHRVDCPPEAPGDASNAVNYAHW

SEQ ID NO: 1367 - DNA, 732 bp, Corynebacterium glutamicum
  CDS (101)..(709): RXN02951
gataatgagtcagaaaatgaaggtagcactacttgctggattaattttcaaggttttctttcagaaattaatccatagccgatatttaaggtgagaacacatgagctccacgctcgcacgaaaagcttcaggcgacggttccgaaaagaagaagcctggcttgtttagacgtgcgcttcgtttcctcacccacccacctcacaaacaggtagacaacagccttgcggatatccgtgaaggattaggcctcggggtggacgattcccacgaaggatccaaacccagcaacgatcattctttgctgcatgaaaagcctgaaatttccgtcatgccgaccgaatcaatggcacggctgatcttttatgcgcctgatatggatgggcaaacagaccccggtgaagtagtgtggatttgggcaccagccgatggcccccagcaaccaccccgtaaacgtgccatcgttgttgttggaagaaaccgaaacgccattttaggtctgctcatttcctgcaaccccgagcaccgcactgatgaagactggatcgacattggatctggcagctgggaccctcgaggtcgccaaagttgggtacgactcgaccgcgttctggaggtacccgaattgggtatccggcgccaaggaacagtcgtccccccggggcgctttgagcgtatcgccaaccgcctccgcaacgatttcaactgggtctaacatttatttggtaattgggc

SEQ ID NO: 1368 - protein, 203 aa, Corynebacterium glutamicum
MSSTLARKASGDGSEKKKPGLFRRALRFLTHPPHKQVDNSLADIREGLGLGVDDSHEGSKPSNDHSLLHEKPEISVMPTESMARLIFYAPDMDGQTDPGEVVWIWAPADGPQQPPRKRAIVVVGRNRNAILGLLISCNPEHRTDEDWIDIGSGSWDPRGRQSWVRLDRVLEVPELGIRRQGTVVPPGRFERIANRLRNDFNWV

SEQ ID NO: 1369 - DNA, 414 bp, Corynebacterium glutamicum
  CDS (101)..(391): RXN02957
gcatgctattgcgctccgggtgggagattctgtcgtccatgccgcggttgtggtggcgcaatgactgcgccccgggcacggaatggctccgggtcaccaaatgcaaactgcccaaggaggaagggtctacacctcactgatggacgagaagtccctttccccgttgatcggtctgccgggtcgggagaacatcggcctgggccgacactggcacggtctgtcgacgatgttgcgggtgctcaacggcatcgtctacgtcgttctgctgttcgccaccgggctgtggcaaggcattatccccacctcctgggacgtcttccccgaggcgtgggagacattgaaggtttacctgggctttcgtgccccaggcatcgagcacttcacccccctatgacgccttgcaaatgctgggct

SEQ ID NO: 1370 - protein, 97 aa, Corynebacterium glutamicum
MQTAQGGRVYTSLMDEKSLSPLIGLPGRENIGLGRHWHGLSTMLRVLNGIVYVVLLFATGLWQGIIPTSWDVFPEAWETLKVYLGFRAPGIEHFTPL

SEQ ID NO: 1371 - DNA, 441 bp, Corynebacterium glutamicum
  CDS (101)..(418): RXN02967
gggaatctagtcggccttcaccggtgatcaacaagtcagtttctggcagcgcatcctcgattccgttggagcgggcaatcagtggcgcgccggggaggatatggatctgttggtcgttgccgtgcatgagggtggacagccacgtcagtccgattgcaatgcccccggctgcgcccatacctggctttgtgccatcaacttccagttgggcgcaggcgtggtggagggcggcgtcgagaagcgaaatgtctttttcggtggcacctttttggggcccgaatacggtggccgcgccctgcgggccggtggcgggggcgtcgacatcggtgagcaggatccattcgacggcggctgcggggatgttgagttcggcggtatcgatgtaatcgaggttgatgaggtcggcgccaccggttcgtagtgcgtagccctctttgttgc

SEQ ID NO: 1372 - protein, 106 aa, Corynebacterium glutamicum
MDLLVVAVHEGGQPRQSDCNAPGCAHTWLCAINFQLGAGVVEGGVEKRNVFFGGTFLGPEYGGRALRAGGGGVDIGEQDPFDGGCGDVEFGGIDVIEVDEVGATGS

SEQ ID NO: 1373 - DNA, 435 bp, Corynebacterium glutamicum
  CDS (101)..(412): RXN02971
ttctggtccggattttcggggaatacagcgagggagaaacgtggcacgccattcaagtgggaattcaaacttaaggttatctaaatcgctaaccattgcgttgattgccatcgtcgctctcatcgtggcacttgtggtgtggctttttaaccgttcagatgattctggctccaccacgaccacctcacaagagtgcatctccggaaacttgagtctgcccgttggtggcgattccaccgcagccgaagaattagtgaacaaatttaatgactcatcacctgtcagccgtgatttctgtgttgaggcggaagctgtggacggtaacgtccccgctgccacgtacctgttcgctggttctcgttctgatgctgccaccgcacttgctgaaaccggtgccgtagcaagcagctcttaaagctcttggccctaggttgg

SEQ ID NO: 1374 - protein, 104 aa, Corynebacterium glutamicum
LIAIVALIVALVVWLFNRSDDSGSTTTTSQECISGNLSLPVGGDSTAAEELVNKFNDSSPVSRDFCVEAEAVDGNVPAATYLFAGSRSDAATALAETGAVASSS

SEQ ID NO: 1375 - DNA, 1632 bp, Corynebacterium glutamicum
  CDS (101)..(1609): RXN02978
gcctcttaaaatcagacaatttcagtgttggaatagctacaagggtctactgtaaacgaagaacgctcgatagggctgtgtacctcaacggaggtaaaacgtgattgatcgacctgtatggttgtttgaactttataacaccgcgaaagaagtagtatattcgctactcattgatcaagtaactggggaaaatacaatactcaagaaggatgatggttggcgagatcaattcatgattgagtctttctttgcttatgattcagaagctgacgcgacctcgtggagcggtaagaacatgaatagctactggttcgttagcgatctaatcagcaatatatccttcgctgagcgatccttggaaagcttttcttgggctcttcgagatcttgaggatctttcttctagtgaaactgaatttgaagggcttgaagagctgaatctaaagtttagtgagctccaagaatggtatacgaacctggaacttccttttcagccgtcggctgctgatgttgatgaggtggagcagtatctgcaagctgaagtgacaaggcaacggggtgactatcaatggtctcctgagttttggataccaaagccggattcatactatatcgaccatgcactagcggttgtcacagatgttttgggagctattgaacaaggggagctgcgtgaagaagtagaggtgcagcaggctttagacgaggtatctgaaaattggaatcctttggaagattctgattactacttacaggatcaccgtgggcgccctgtacaagatctttcccgggaaatggaggagttggtcagatgtctaatgcttgaccaagagtggtggggtgcagaggcaaggattagaaagcttgttgaatcagttgagtgggaggatactcaggcgatcagctctttaattgaacacgagcaatattgggaggatggtcgttttcgcccacctctacataagttttcggaaggactagacgagccagagcccttgccgatgacgagaaaaatgatacttgcgacgaatcaccctgatgttttacgcgtaaacattgctgattattatcagcagcataggcgcattgctactcagaaggtggaatgttataaggaagttttggcattgtatccagagattcttaagaaatttgatgattcatctttcgtcaatcgacattggatctatagggcgtttgatcgcgaaggtcagcttttgtatatcggggagacaataaaccctcttgtacggttgagggagcatgccggcttagggtctattaaccacgcacatcataggctagtatcgccgtggttttctacgatggctacatttcatcttgaatcttgctttacccaggctgaggcaaaagagaaggaggctttatatattaagctggaacagccaagatataataagacgcataattctgctagattggcggtttctgaagaaggggtgccggtgaacgaggtgccgtcaagaaatgatccgaggaatgtcggttggaagggtcataggcacgtgccaccaatgttgccgattgttgcacgtgttgtcgatgaatcgacaacacgtgagggatatgcgttttacgaggacaaccggtagcgttgcgatctctcgtggaa

SEQ ID NO: 1376 - protein, 503 aa, Corynebacterium glutamicum
VIDRPVWLFELYNTAKEVVYSLLIDQVTGENTILKKDDGWRDQFMIESFFAYDSEADATSWSGKNMNSYWFVSDLISNISFAERSLESFSWALRDLEDLSSSETEFEGLEELNLKFSELQEWYTNLELPFQPSAADVDEVEQYLQAEVTRQRGDYQWSPEFWIPKPDSYYIDHALAVVTDVLGAIEQGELREEVEVQQALDEVSENWNPLEDSDYYLQDHRGRPVQDLSREMEELVRCLMLDQEWWGAEARIRKLVESVEWEDTQAISSLIEHEQYWEDGRFRPPLHKFSEGLDEPEPLPMTRKMILATNHPDVLRVNIADYYQQHRRIATQKVECYKEVLALYPEILKKFDDSSFVNRHWIYRAFDREGQLLYIGETINPLVRLREHAGLGSINHAHHRLVSPWFSTMATFHLESCFTQAEAKEKEALYIKLEQPRYNKTHNSARLAVSEEGVPVNEVPSRNDPRNVGWKGHRHVPPMLPIVARVVDESTTREGYAFYEDNR

SEQ ID NO: 1377 - DNA, 1689 bp, Corynebacterium glutamicum
  CDS (101)..(1666): RXN02995
aaggcaaggtcggagacgagccttgttagttcagagtcctaaataggcgtttatgtcagctcgcgcaacagggatacaatgagcaaccgtgacgcagcaattgaaccacgcaaaggtaaatcaacatcccggtcaagccaccctcccagaaaccgcagaggggcaggttcgcacctacgaggtaaaaacctacggctgtcagatgaatgtgcacgattctgagcgcctttcgggcctgctcgaggaggctggatacgttgctgctccggaggacaccactccggatcttgtcgtatttaatacgtgcgccgtgcgtgaaaacgccgatatgcgcctctatggcactttgggcaacctgcgcagcgtgaaagaaaagaacccaggcatgcaaatcgctgtcggtggttgtttggctcaaaaagacaaagataccgtggtgaaaaaagcaccgtgggtggacgtggtgtttggtacccacaacattggttccttgccaaccttgcttcagcgcgcggagcacaatgcccaagcggaagtcgaaattgtcgattccctcgagcagttcccgtcagtacttcctgcaaagcgcgagtctgcttacgctggttgggtgtccgtatcagtcggatgtaacaacacctgtactttctgcatcgttccgtcgctgcgcggtaaagagcaggaccgtcgaccaggagacatcctcgcagaggtacaagcactggtggatcagggagttaccgaggtaactctacttggccaaaacgtaaatgcttacggcgtgaactttgttgatcctgagctagagcgcgatcgcagtgcattttccaagctgcttcgtgcctgtggtgagatcgaaggcctcgagcgggttcgcttcaccagccctcaccctgcagaattcacctctgatgtcattgacgccatggcagagaccccaaacatctgcccgcagctgcacatgccactgcagtccggatctgacaaggtgctcaaagagatgcgccgttcctaccgatccaagaagttcctctccatcttggatgaggtccgtgcgaagatccctcacgcctctatcaccaccgatattattgtcggattccctggcgaaacagaggaggatttccaagcaaccctcgacgttgtcaagaaggcacgctttacttctgcttacaccttccaatacagcccacgccctggcacccctgcagcggaatatgaaaaccagcttccaaaagaagttgtgcaggaacgctacgagcgcctcatggtcgttcaggaacaagtctgcgaagaagaaaaccaaaagctcatcggcaccaccgtcgaattgctggtccaggctggcggaggccgcaagaacgatgccaccaagcgcatgagtggtcgcgcacgcgatggacgcctcgtgcactttgcgccagagggcgacattgatggtgagatccgccccggcgattttgtcactgtcacggtgactgaggccaagcctttcttcctcatcgcagactccggtgtgcagacccaccgccgcaccaaagctggtgacaactctgcagttggtcaagttccaaccacagcaccgatcggtgtgggcttgggactgccacaaatcggcgcaccaaaggtggctcctgccacagaatctgcctgctgctccattaactaaaaattgcaggctagaataga

SEQ ID NO: 1378 - protein, 522 aa, Corynebacterium glutamicum
LNHAKVNQHPGQATLPETAEGQVRTYEVKTYGCQMNVHDSERLSGLLEEAGYVAAPEDTTPDLVVFNTCAVRENADMRLYGTLGNLRSVKEKNPGMQIAVGGCLAQKDKDTVVKKAPWVDVVFGTHNIGSLPTLLQRAEHNAQAEVEIVDSLEQFPSVLPAKRESAYAGWVSVSVGCNNTCTFCIVPSLRGKEQDRRPGDILAEVQALVDQGVTEVTLLGQNVNAYGVNFVDPELERDRSAFSKLLRACGEIEGLERVRFTSPHPAEFTSDVIDAMAETPNICPQLHMPLQSGSDKVLKEMRRSYRSKKFLSILDEVRAKIPHASITTDIIVGFPGETEEDFQATLDVVKKARFTSAYTFQYSPRPGTPAAEYENQLPKEVVQERYERLMVVQEQVCEEENQKLIGTTVELLVQAGGGRKNDATKRMSGRARDGRLVHFAPEGDIDGEIRPGDFVTVTVTEAKPFFLIADSGVQTHRRTKAGDNSAVGQVPTTAPIGVGLGLPQIGAPKVAPATESACCSIN

SEQ ID NO: 1379 - DNA, 752 bp, Corynebacterium glutamicum
  CDS (1)..(729): RXN02997
cccctaccgggccagccctttgagggcgaggctttaacgcttataaacgccctcctccaccacgccgaaaacgtcgcagcctccaacccctggaagcgcaccaccttccacaccgctcacatgcaccctccagggagtaatgcggattgtgactactgcctggtgctgcaacgccgcggatacgttaaagcccacgaagaaatccaacaaaccatcccgcttccttcaggtgactggtccgctggagaattcaccgtggtggacgttgaaggcaccgccttcccaagcgcgctgatccccagcatcgtggaactccaacaccgcgcagccctcgatgtgccccacggaaacttaagtgttgcgcctgcacagtgggatgaacaccgcttggcgcagcaatctgaaagaatccttaaaacaggaacgaaactgttcaccgtactgtttgccgaaggatccacagtcgctgccatgtcctccatcgcgattcccccaggctccaaccctgacatcgccgaacagggactgaccatcgtgcacccagatttcagaggccgtggtcttggaaccgctgtgaaattagcgggactgtcactactttcgaggtgccacccagaaattcaacgcgtagccacctcaaatgcagtagacaaccatgcgatgctggcgattaaccgctccataggggcaacagagatcgcccgaaccaccctgtgggagaagaaactctaggtgatggaattcgagaccaa

SEQ ID NO: 1380 - protein, 243 aa, Corynebacterium glutamicum
PLPGQPFEGEALTLINALLHHAENVAASNPWKRTTFHTAHMHPPGSNADCDYCLVLQRRGYVKAHEEIQQTIPLPSGDWSAGEFTVVDVEGTAFPSALIPSIVELQHRAALDVPHGNLSVAPAQWDEHRLAQQSERILKTGTKLFTVLFAEGSTVAAMSSIAIPPGSNPDIAEQGLTIVHPDFRGRGLGTAVKLAGLSLLSRCHPEIQRVATSNAVDNHAMLAINRSIGATEIARTTLWEKKL

SEQ ID NO: 1381 - DNA, 553 bp, Corynebacterium glutamicum
  CDS (101)..(553): RXN03001
cccggttcacgtgatcaatgacttcacgagcaccgatgaaatcgatgctgcgcttcgtgaacgctacgacatctaactactttaaaaggacgaaaatattatggactggttaaccattcctcttttcctcgttaatgaaatccttgcggttccggctttcctcatcggtatcatcaccgccgtgggattgggtgccatggggcgttccgtcggtcaggttatcggtggagcaatcaaagcaacgttgggctttttgctcattggtgcgggtgccacgttggtcactgcctccctggagccactgggtgcgatgatcatgggtgccacaggcatgcgtggtgttgtcccaacgaatgaagccatcgccggaatcgcacaggctgaatacggcgcgcaggtggcgtggctgatgattctgggcttcgccatctctttggtgttggctcgtttcaccaacctgcgttatgtcttgctcaacggacaccacgtgctgttgatgtgcaccatgctcaccatggtcttggccaccggaagagttgatgcgtggatcttc

SEQ ID NO: 1382 - protein, 151 aa, Corynebacterium glutamicum
MDWLTIPLFLVNEILAVPAFLIGIITAVGLGAMGRSVGQVIGGAIKATLGFLLIGAGATLVTASLEPLGAMIMGATGMRGVVPTNEAIAGIAQAEYGAQVAWLMILGFAISLVLARFTNLRYVLLNGHHVLLMCTMLTMVLATGRVDAWIF

SEQ ID NO: 1383 - DNA, 891 bp, Corynebacterium glutamicum
  CDS (101)..(868): RXN03005
taggtaaaccttaaacagtcgccattgaagaattttaaaaacaaacaaccttcaacgcgctaacaagcatcttcccactctcgttaccggagtttctcacatgtctcacaagttttcccgccgtgctttcgcagtactgaccgctgccgcaatttccacttccgctttcgcaaccactgctccgtctgcgattgcagagccagttctaatgtcgcactgcagacgattccagcgtcgcaacttcagaaaactccctcgactggggcttcaaggcttcctggcgcacctatgtcaccggaccttggactggtggaaccgtgacgcaactggcggtgcaactgtcaacgaagatggaacctacaacttcaccctcggaactggctccaattacgacgtcgacaccgagaagggccagctgaactacgaaggaactgttgccttcgccagtgacgctcacggcttcaacatcaccttgtccaacccgcagatcaccgtcgagggcgacactgcaactttgagcgccgagctgtctgacaatgccgctcccgaagagacctccactactcgcgttgatgttgctgagttcgaactgaccgctcctgaggtttcagaaaccgatgcggacattacctacacctggaccgatgcttccggcactttcttggagaccctgcagcctgaagaattgagccgttacgcaggccaggaagcggatgcgctgagcttctccatcaccgtggacaaggcttcagagaacccttccgatgatgttgctaccggatcttcctccagcttcctctccaccatcttgaacttccttcagcagctggcgagcccactgctcaagctcttcggttcgctttcttcctaaataatcagtaatgccccacc

SEQ ID NO: 1384 - protein, 256 aa, Corynebacterium glutamicum
MSHKFSRRAFAVLTAAAISTSAFATTAPSAIAEPVLMSHCRRFQRRNFRKLPRLGLQGFLAHLCHRTLDWWNRDATGGATVNEDGTYNFTLGTGSNYDVDTEKGQLNYEGTVAFASDAHGFNITLSNPQITVEGDTATLSAELSDNAAPEETSTTRVDVAEFELTAPEVSETDADITYTWTDASGTFLETLQPEELSRYAGQEADALSFSITVDKASENPSDDVATGSSSSFLSTILNFLQQLASPLLKLFGSLSS

SEQ ID NO: 1385 - DNA, 448 bp, Corynebacterium glutamicum
  CDS (101)..(448): RXN03009
atgtgaacctgatgctggcacctgaagatagccacagcccaggcaccgcaacagtgacctaccgtcatggtttcagcgatcaccgtttaccctgcactgcgtggctaatatcgccagcttgtacggactgtgggaaggcagcacatccacaccaatcgaacagctcgtacctgcgaaaggttccagctttcgtttggtgaggtctttttacaggcgaattgacggccaagcagttcaggctcgtctcaaggagaagattctcaacaccgcggaaaacccgcttcctcgcttggacattccaggtaaggagcgcactgcgcagtacccagaaaatccggataccttcgcccaaaaagcagctcaagaaattcttgatgagttcagaactccactgatcggtgaagaagctgcagctcatgttgagaaaacgaagacgattttctggaag

SEQ ID NO: 1386 - protein, 116 aa, Corynebacterium glutamicum
VANIASLYGLWEGSTSTPIEQLVPAKGSSFRLVRSFYRRIDGQAVQARLKEKILNTAENPLPRLDIPGKERTAQYPENPDTFAQKAAQEILDEFRTPLIGEEAAAHVEKTKTIFWK

SEQ ID NO: 1387 - DNA, 360 bp, Corynebacterium glutamicum
  CDS (101)..(337): RXN03010
tgggcgccttcaatcggcacccactgaatggattcttccgggcctagttttagggctgatcagcctgggactcaatgcgtggattaccttcggtgcgccagtgcccaccgataatctttttctcatcgttgctggaattgcgtgggtgttggcaggaattttgagcgtgctgtccatcggcaagtacatgtcagcagtaaatgagcgaaagtcgacaggcttttatacagaagtgccgtggaagaaagcgctctttactgcgacagccgtcctattggtgtttgctgttgtgtggtcggccttggatattgccctgtgggtaggaaagcagtcatggtgaacacgttgaactctaaaacc

SEQ ID NO: 1388 - protein, 79 aa, Corynebacterium glutamicum
VPTDNLFLIVAGIAWVLAGILSVLSIGKYMSAVNERKSTGFYTEVPWKKALFTATAVLLVFAVVWSALDIALWVGKQSW

SEQ ID NO: 1389 - DNA, 324 bp, Corynebacterium glutamicum
  CDS (101)..(301): RXN03011
ccgacgtaccagtttttgtcgttccacccctggactaaaaccgagacgagaaccaagaagatgaaaccaaggggtaaaaactggtagtctcttccacgtcatggcatacgaaactgattccctcaaccgacgcaccctcgggcccgcgattgcaagcgcagtcgtgggaatcgccgtcggcgcagtcgcagtagttggggtttcaatgatctcagggcaggacactgttcccactggtaacgccgtaactgcagacgatgccctgctcggtggccctgagtatggttcacgcgaagcagactaagaagccacttccccgttttc

SEQ ID NO: 1390 - protein, 67 aa, Corynebacterium glutamicum
MAYETDSLNRRTLGPAIASAVVGIAVGAVAVVGVSMISGQDTVPTGNAVTADDALLGGPEYGSREAD

SEQ ID NO: 1391 - DNA, 593 bp, Corynebacterium glutamicum
  CDS (1)..(570): RXN03012
accactatcaacatcatcatcaccaatggcgctgcaccacacccaactaatctcaatcgcgcagaaattcatgatcacctacccctcactgcctctgattcggagctaacccgcccctcccaggaatcagttctctatgaccatgaatccgaaactgtcttgcgcaccatggtcatccctgcagacctgcacgtcgctatgaagcatctagctaaaaaacacaacctcacggtcacagagatctcgcgcatccttctgcagcgctacatcgaccgcaatattaaccatgtagagcaaaaccaggctgaatccgacatggtggaagtctttgccagccaaccaaccaatgcaaccgcaatgatccctgtacctggaaccagcttcaggcaaatatttatcaagcacagcactggtttctggaaaaacattgatcatgatcttgtcgatctcgacgcctctaagaccccgcgtgtacgcgaccgcagtgtcttaccacaacctcaactccacagagcgttgttatcagatgctgatatggctcgccttgcagcacaactgaccgacaaacactaaaacctccacaacaaggacat

SEQ ID NO: 1392 - protein, 190 aa, Corynebacterium glutamicum
TTINIIITNGAAPHPTNLNRAEIHDHLPLTASDSELTRPSQESVLYDHESETVLRTMVIPADLHVAMKHLAKKHNLTVTEISRILLQRYIDRNINHVEQNQAESDMVEVFASQPTNATAMIPVPGTSFRQIFIKHSTGFWKNIDHDLVDLDASKTPRVRDRSVLPQPQLHRALLSDADMARLAAQLTDKH

SEQ ID NO: 1393 - DNA, 1662 bp, Corynebacterium glutamicum
  CDS (101)..(1639): RXN03017
aactcaatattaaagtcgcgtaattagtgttatattaattacgcgactttaatagttttcgaatacgtagattctcgaaatacagcagaaagcaggggttatgctcgattcattgaaaaatcgcttcaccaaagcgaaaggttctcatggagtgggggagggggctgtttctggcgatgcagcagtaaagccactgcgcaaagaagaacgactcgcctcagtcattcaggaaaccgaaccaggtgctgcagtcgaggtcatgcgtcgcaatgacgcattcgctttgccaggtgagaccggttgggtagtcatgctgttgccaactcacgattcacaattcggtgggctcaacgctaaggaaaagaaccgcgaggataaaggcacgatcatcaacctggtggtcaacgatgatattcattccgttgtcactccagaacttcttgacagcgatgtgcttggtgtcattcctgatgcagattctttcgatcgcatggatgagtttgatttactgcgtaacaaagcacgctggcactacggagtggctgcaattgaacctgacacgggtgagctggtggtgtttaaggtgcccgcgaaaaatagcgcttcggcacgcggtgacattttttccgaggtcggcgatgtgcttagcggtgctgctgacctcgaagacgtggttgattttgaggtcattgccaccttcctagaggtgctgaatgagacctctgaggtggatattgatgacgaagatggcgacgtgccttatggtcttgagggtgtcaatgcagcgggagttatcacggatgacctcattcgcgagaagcttgatgtggattcctatccgagcagtgcagagatcattgacaatattgtgcatgtgttcaccaagttgcagggcaagcatcatgtggcaccacagccggtgcttcacagcgcagacgtagtggatgttgatgcacaggagtcccatgacacagtggttattgagagccctgatgatgtcgcactagcagaacaggtggatgtaccggatttcagtgatggatttggtattgacgatgccgaggttactgagccagaggatgaggaggttgtcgaagcaacagctgatgcagatccttttggtgatgtagcagaagacgatcctttcggcagtgatgatgaaccagattttggtgcatccgatgttgttgctgcaccggcacctgtagccggcatgtccgatgagcagatccaggcgctgattcgtggtgtgtctgagtccgtgcaagcaaagactggttcagaacttaatgctttgcgagaagaacttgcacaagcactggcttacaatccggttcaggattcacaggcagcattggcacaggtgcacgcagctgatgcccgcagctttgatgccgatcaagtgggtgatgctgtcaccaaacgttatgttaatgacgacttggggctgtatgtcgatgaggcaaacttcaataatgctttgaccagggcaccgttccaggtggcgatgccgcaattccaggagactacaccgtggttaggtgatcagcttcgtacattggtggctgtgtttaatggtcagctgcttgatcagcatcagcgtgactaccgaagaagtgcgcgcgatgtacattgcgcttaatgatcgctctaatcttgaga

SEQ ID NO: 1394 - protein, 513 aa, Corynebacterium glutamicum
MLDSLKNRFTKAKGSHGVGEGAVSGDAAVKPLRKEERLASVIQETEPGAAVEVMRRNDAFALPGETGWVVMLLPTHDSQFGGLNAKEKNREDKGTIINLVVNDDIHSVVTPELLDSDVLGVIPDADSFDRMDEFDLLRNKARWHYGVAAIEPDTGELVVFKVPAKNSASARGDIFSEVGDVLSGAADLEDVVDFEVIATFLEVLNETSEVDIDDEDGDVPYGLEGVNAAGVITDDLIREKLDVDSYPSSAEIIDNIVHVFTKLQGKHHVAPQPVLHSADVVDVDAQESHDTVVIESPDDVALAEQVDVPDFSDGFGIDDAEVTEPEDEEVVEATADADPFGDVAEDDPFGSDDEPDFGASDVVAAPAPVAGMSDEQIQALIRGVSESVQAKTGSELNALREELAQALAYNPVQDSQAALAQVHAADARSFDADQVGDAVTKRYVNDDLGLYVDEANFNNALTRAPFQVAMPQFQETTPWLGDQLRTLVAVFNGQLLDQHQRDYRRSARDVHCA

SEQ ID NO: 1395 - DNA, 2616 bp, Corynebacterium glutamicum
  CDS (101)..(2593): FRXA02753
aactcaatattaaagtcgcgtaattagtgttatattaattacgcgactttaatagttttcgaatacgtagattctcgaaatacagcagaaagcaggggttatgctcgattcattgaaaaatcgcttcaccaaagcgaaaggttctcatggagtgggggagggggctgtttctggcgatgcagcagtaaagccactgcgcaaagaagaacgactcgcctcagtcattcaggaaaccgaaccaggtgctgcagtcgaggtcatgcgtcgcaatgacgcattcgctttgccaggtgagaccggttgggtagtcatgctgttgccaactcacgattcacaattcggtgggctcaacgctaaggaaaagaaccgcgaggataaaggcacgatcatcaacctggtggtcaacgatgatattcattccgttgtcactccagaacttcttgacagcgatgtgcttggtgtcattcctgatgcagattctttcgatcgcatggatgagtttgatttactgcgtaacaaagcacgctggcactacggagtggctgcaattgaacctgacacgggtgagctggtggtgtttaaggtgcccgcgaaaaatagcgcttcggcacgcggtgacattttttccgaggtcggcgatgtgcttagcggtgctgctgacctcgaagacgtggttgattttgaggtcattgccaccttcctagaggtgctgaatgagacctctgaggtggatattgatgacgaagatggcgacgtgccttatggtcttgagggtgtcaatgcagcgggagttatcacggatgacctcattcgcgagaagcttgatgtggattcctatccgagcagtgcagagatcattgacaatattgtgcatgtgttcaccaagttgcagggcaagcatcatgtggcaccacagccggtgcttcacagcgcagacgtagtggatgttgatgcacaggagtcccatgacacagtggttattgagagccctgatgatgtcgcactagcagaacaggtggatgtaccggatttcagtgatggatttggtattgacgatgccgaggttactgagccagaggatgaggaggttgtcgaagcaacagctgatgcagatccttttggtgatgtagcagaagacgatcctttcggcagtgatgatgaaccagattttggtgcatccgatgttgttgctgcaccggcacctgtagccggcatgtccgatgagcagatccaggcgctgattcgtggtgtgtctgagtccgtgcaagcaaagactggttcagaacttaatgctttgcgagaagaacttgcacaagcactggcttacaatccggttcaggattcacaggcagcattggcacaggtgcacgcagctgatgcccgcagctttgatgccgatcaagtgggtgatgctgtcaccaaacgttatgttaatgacgacttggggctgtatgtcgatgaggcaaacttcaataatgctttgaccagggcaccgttccaggtggcgatgccgcaattccaggagactacaccgtggttaggtgatcagcttcgtacattggtggctgtgtttaatggtcagctgcttgatcagcatcagcgtgactacgaagaagtgcgcgcgatgtacattgcgcttaatgatcgctctaatcttgagatcgctcgtgatcttggactggataataaggattccgaattctacgaggtttaccgtgccattgagcgtgaccgcgatgttatggctggtgatcaacagcgtgtggagtcagagcgtcgtcagcaattgcagcaggagtatgaggcgaaccgtgaagaatatgtcatggcaaagatcgcggagcagcgcgtggagtatgatcgccgtcatatgcctcgccataccgcatcactagaagcggtaggtcgagagctgacgagcctgcgggatcgcaccattgaggattacaccgcacgcatgaacacgctgcgtcgtgcacgtgctggtgaacgggctaacgctgcagaatctcgcattattgacgaattgcgcccgattgtggagcgccaggcagaactgcaacgagcagctttcgatggtttcattgttgatcttgacaagtttattgctgatcaccgcgaagatgacctgcgtttggcatcggtgaatgagcagaagcttgctgcagataatcgtgtggcacagttgaccaaggaagccgaagagcgcatcgagggtatccgcgtcgagaccgataagatgatcgcctcccagcgcaaggcacttgagcgtcaggaagcggaattcgcagcagagcttaagcgtcgcgacactattgtcgctgcatcggaggaacgtgctgagcgggaaattaccacagcacgtcttgatgctgaggcggcgctcaagcgcatggaagagcaaattcgtgtaaataatgaggcgcatgaggcggagattgttattgagcgcgatcgagccacccaagcagaggcgaactccatgacgtttgttgagtcagtcaagcagcaggatcgcagcaacaacatcattttgattgccgtcctcattgtggggctgattgccggcatggtcgctggcgcagccttcttctaaaagatcgttgcgcgggctgt

SEQ ID NO: 1396 - protein, 831 aa, Corynebacterium glutamicum
MLDSLKNRFTKAKGSHGVGEGAVSGDAAVKPLRKEERLASVIQETEPGAAVEVMRRNDAFALPGETGWVVMLLPTHDSQFGGLNAKEKNREDKGTIINLVVNDDIHSVVTPELLDSDVLGVIPDADSFDRMDEFDLLRNKARWHYGVAAIEPDTGELVVFKVPAKNSASARGDIFSEVGDVLSGAADLEDVVDFEVIATFLEVLNETSEVDIDDEDGDVPYGLEGVNAAGVITDDLIREKLDVDSYPSSAEIIDNIVHVFTKLQGKHHVAPQPVLHSADVVDVDAQESHDTVVIESPDDVALAEQVDVPDFSDGFGIDDAEVTEPEDEEVVEATADADPFGDVAEDDPFGSDDEPDFGASDVVAAPAPVAGMSDEQIQALIRGVSESVQAKTGSELNALREELAQALAYNPVQDSQAALAQVHAADARSFDADQVGDAVTKRYVNDDLGLYVDEANFNNALTRAPFQVAMPQFQETTPWLGDQLRTLVAVFNGQLLDQHQRDYEEVRAMYIALNDRSNLEIARDLGLDNKDSEFYEVYRAIERDRDVMAGDQQRVESERRQQLQQEYEANREEYVMAKIAEQRVEYDRRHMPRHTASLEAVGRELTSLRDRTIEDYTARMNTLRRARAGERANAAESRIIDELRPIVERQAELQRAAFDGFIVDLDKFIADHREDDLRLASVNEQKLAADNRVAQLTKEAEERIEGIRVETDKMIASQRKALERQEAEFAAELKRRDTIVAASEERAEREITTARLDAEAALKRMEEQIRVNNEAHEAEIVIERDRATQAEANSMTFVESVKQQDRSNNIILIAVLIVGLIAGMVAGAAFF

SEQ ID NO: 1397 - DNA, 1116 bp, Corynebacterium glutamicum
  CDS (101)..(1093): RXN03018
gtggcgatgccgcaattccaggagactacaccgtggttaggtgatcagcttcgtacattggtggctgtgtttaatggtcagctgcttgatcagcatcagcgtgactaccgaagaagtgcgcgcgatgtacattgcgcttaatgatcgctctaatcttgagatcgctcgtgatcttggactggataataaggattccgaattctacgaggtttaccgtgccattgagcgtgaccgcgatgttatggctggtgatcaacagcgtgtggagtcagagcgtcgtcagcaattgcagcaggagtatgaggcgaaccgtgaagaatatgtcatggcaaagatcgcggagcagcgcgtggagtatgatcgccgtcatatgcctcgccataccgcatcactagaagcggtaggtcgagagctgacgagcctgcgggatcgcaccattgaggattacaccgcacgcatgaacacgctgcgtcgtgcacgtgctggtgaacgggctaacgctgcagaatctcgcattattgacgaattgcgcccgattgtggagcgccaggcagaactgcaacgagcagctttcgatggtttcattgttgatcttgacaagtttattgctgatcaccgcgaagatgacctgcgtttggcatcggtgaatgagcagaagcttgctgcagataatcgtgtggcacagttgaccaaggaagccgaagagcgcatcgagggtatccgcgtcgagaccgataagatgatcgcctcccagcgcaaggcacttgagcgtcaggaagcggaattcgcagcagagcttaagcgtcgcgacactattgtcgctgcatcggaggaacgtgctgagcgggaaattaccacagcacgtcttgatgctgaggcggcgctcaagcgcatggaagagcaaattcgtgtaaataatgaggcgcatgaggcggagattgttattgagcgcgatcgagccacccaagcagaggcgaactccatgacgtttgttgagtcagtcaagcagcaggatcgcagcaacaacatcattttgattgccgtcctcattgtggggctgattgccggcatggtcgctggcgcagccttcttctaaaagatcgttgcgcgggctgt

SEQ ID NO: 1398 - protein, 331 aa, Corynebacterium glutamicum
VTTEEVRAMYIALNDRSNLEIARDLGLDNKDSEFYEVYRAIERDRDVMAGDQQRVESERRQQLQQEYEANREEYVMAKIAEQRVEYDRRHMPRHTASLEAVGRELTSLRDRTIEDYTARMNTLRRARAGERANAAESRIIDELRPIVERQAELQRAAFDGFIVDLDKFIADHREDDLRLASVNEQKLAADNRVAQLTKEAEERIEGIRVETDKMIASQRKALERQEAEFAAELKRRDTIVAASEERAEREITTARLDAEAALKRMEEQIRVNNEAHEAEIVIERDRATQAEANSMTFVESVKQQDRSNNIILIAVLIVGLIAGMVAGAAFF

SEQ ID NO: 1399 - DNA, 1539 bp, Corynebacterium glutamicum
  CDS (101)..(1516): RXN03024
ctctacccacttaaaatggacgcatattcgcaagataaggcatgcttggatgaatagattttaactcaacgtttactaaacagaatcggaattaggagccatgcttgaacgcacacaggtattcgtggatacgtcctacctgctcgcaagcttttacaactcttgggagacaggggcacgtgcccaattagaaatcgacctccccgaagtagtcggggtattaggaaggatgattgaacaacaacttaaacagccagtacaacgccaaatgtggtacgacggaatccccgattccggcccccaccgctatcaacgagcactacgcacctgcgatggtgtgcaacttcgtgctggccaattaattgaatggggcgaacgccgcacacaaaaggcagtagatacccgccttgttgcagacctcgttctcgcaggtgttcgcggacaatgctccgatatcgtgctcgtcagtggcgacgccgacatgatccccggtgttcaagaagctgccaatgcaggccttcgcgttcacctctacggcttcggctgggattccatgtcctcccaactgcgccactgctgtgacaccaccaccattttggatcctcgagaagattttgctgaatgcatgcagctgcaggttctcgaaggtccactaccccctgtcgttcgggtaaagcccatcaacgatgcagaacccatcgaggatttggatttcactccagttccaggcgtcgcctcaccatttgaagaggtcagcgcgaaagatgagaaattctctccacgcccaagtgaacctgccgaagctttgtcggaacaggtctgtgaagcgcagtatgagatctccaaacacgaaggtcaaaccgctgattcaggagaaatcaccgagtctttcgaggccgctgaaatcaaggtaactgagttttttggagaaccagctgctccagtagcggaatcaggcgtagaagctcccactccggaagctcccacggttcctgaagcagctaagcccactccggcgaaacctaagactccaaaggcagagccccaaaagcaagaatcccccaagccgggaactccaaaaccaaaagctccaagccctgcggatattccaccgaaagccccagctgacactgaggaacattcggaagtcgaagctgaaatcgaggactcacgtccaaagatccccagcccttcgatgatggctccccgccgcaagcttcgttcccgctacgttccgcttcccaacgaagtgtgggcaacagcaggattccaaactccttacgatgtcgggcaacagtacgcatcgtggtggtttgaaaacgcagctaccagcactcaaagagatcaggctcatctattgtctggtggcggacttccaccagagatcgatcgcccgcttctgcagtttgcttgtgaaactctccacgaatacaccctgactgaagcgcagcgcgtagctttacgcgatggctttcactccggaatccgtggtgtattgctcaaccagcgagatagctagaatcacaaaaaactggggct

SEQ ID NO: 1400 - protein, 472 aa, Corynebacterium glutamicum
MLERTQVFVDTSYLLASFYNSWETGARAQLEIDLPEVVGVLGRMIEQQLKQPVQRQMWYDGIPDSGPHRYQRALRTCDGVQLRAGQLIEWGERRTQKAVDTRLVADLVLAGVRGQCSDIVLVSGDADMIPGVQEAANAGLRVHLYGFGWDSMSSQLRHCCDTTTILDPREDFAECMQLQVLEGPLPPVVRVKPINDAEPIEDLDFTPVPGVASPFEEVSAKDEKFSPRPSEPAEALSEQVCEAQYEISKHEGQTADSGEITESFEAAEIKVTEFFGEPAAPVAESGVEAPTPEAPTVPEAAKPTPAKPKTPKAEPQKQESPKPGTPKPKAPSPADIPPKAPADTEEHSEVEAEIEDSRPKIPSPSMMAPRRKLRSRYVPLPNEVWATAGFQTPYDVGQQYASWWFENAATSTQRDQAHLLSGGGLPPEIDRPLLQFACETLHEYTLTEAQRVALRDGFHSGIRGVLLNQRDS

SEQ ID NO: 1401 - DNA, 996 bp, Corynebacterium glutamicum
  CDS (101)..(973): RXN03025
agcgaatcggattcagtgatttgcttgcgggcgcagaaatgatttttcaattagacacacttagacacacgtaactaaaacctcagggaagtgactgataatggctaatccgctcagcaagggctggaagtatctcatggcatcgttcgacaacaagatcgatgagaatgcagatccaaagatccaaattcagcaagctacagaagctgcccagaagcagcaccagcagattatgcagcacgcttctcagattatcggtcagcagaagcagcttgagatgaaattgaaccgcttggttactgaccgcgataagttgcaggaacaggctcgtcaggcaattcagttggcagataagtccgcaaacgaaggcgacagtgttaaggctcaggagttcaacaacactgctgaggtttttgcttcccagttggtagctgtggaacagcagttggagcagactactgcgcttcatcagcaggctgaggttgcggcgaaggatgctgttgcgaagtctaaagagtctgagatgcgcctgaaagagcagatgtctcagattgatgctctacgtgcgcaggctgatcaggcgaagatgcaggaaagtgtcactaagtctatggattctttgaatcagtttggcactcaggattcttctgttcctacccttgatgcggtgcgtgagaagatcgagcgtcgatacgcagatgctttgggcgcgcaggaacttacccagaacactgttagtgatcgcatggctgagattgcgcagtccggcaccgatatgcgggcgtcagctcgtttggctgaacttcgcgcggaggcgctgggcacgtccgcaacgcctaagggccagctagaggcaggtgtcgaggatgcggaagaacttatcgacgaaacctccaccccttcagctaccccagaaaccgcaagcccagaagctgatgctccagaagcatccgcagacgagtccgagaagaaataacctaaacacaaaaaactggg

SEQ ID NO: 1402 - protein, 291 aa, Corynebacterium glutamicum
MANPLSKGWKYLMASFDNKIDENADPKIQIQQATEAAQKQHQQIMQHASQIIGQQKQLEMKLNRLVTDRDKLQEQARQAIQLADKSANEGDSVKAQEFNNTAEVFASQLVAVEQQLEQTTALHQQAEVAAKDAVAKSKESEMRLKEQMSQIDALRAQADQAKMQESVTKSMDSLNQFGTQDSSVPTLDAVREKIERRYADALGAQELTQNTVSDRMAEIAQSGTDMRASARLAELRAEALGTSATPKGQLEAGVEDAEELIDETSTPSATPETASPEADAPEASADESEKK

SEQ ID NO: 1403 - DNA, 174 bp, Corynebacterium glutamicum
  CDS (17)..(151): RXN03027
aataggagaatttaaaatggaaaacgtttacgagttccttggaaaccttgatgtcctttccggctccggcctcatcggctacgtcttcgacttcctcggcgcttccagcaagtgggctggcgcagttgctgacctcatcggtctgcttggctaattaacttcgcccacgggcaa

SEQ ID NO: 1404 - protein, 45 aa, Corynebacterium glutamicum
MENVYEFLGNLDVLSGSGLIGYVFDFLGASSKWAGAVADLIGLLG

SEQ ID NO: 1405 - DNA, 630 bp, Corynebacterium glutamicum
  CDS (95)..(607): RXN03029
ggtgtggcttcctattcgctgcatcctgaatatgccatcaaaatcttcactctgaggccgaaaaatccggttatgacattaagtacctaggacaatgtttggagtgggctattatacaaccgcccaccgattgtccaccctgcagcgccccaacttgcgcggcatccccttaaccttcgtgagcgtcgaccgagccggcaacatgtccaaacgccaatccgccacgggcttccacttcacccattacggcggcacctgccccctgtggaacgtgtttgaaaccttcaccaaccccggccaagtgctccgccaattcgcgcaaatgcccgacggacgcaactacctgtggatctcacgcaccgtgcgacaccacgaagcccggttcggcgaagtagacaaaatgttcgccatcggcttgggctgcgaagcgcgccacgccgaccgcactgtgtactcccgcggtttcaacctccaggacctctccaccgccacccccatcgggtccggctgccgagtgtgcacccgcgagaactgcgcgcagcgcgcattcccatccgtccacggccgcatcaacatcgacgcgcacgaatccactatcgcgccgtactaagaaaaggagcttgctttacg

SEQ ID NO: 1406 - protein, 171 aa, Corynebacterium glutamicum
MFGVGYYTTAHRLSTLQRPNLRGIPLTFVSVDRAGNMSKRQSATGFHFTHYGGTCPLWNVFETFTNPGQVLRQFAQMPDGRNYLWISRTVRHHEARFGEVDKMFAIGLGCEARHADRTVYSRGFNLQDLSTATPIGSGCRVCTRENCAQRAFPSVHGRINIDAHESTIAPY

SEQ ID NO: 1407 - DNA, 789 bp, Corynebacterium glutamicum
  CDS (1)..(789): RXN03031
aacaacggccttaacgccatggccgcgatgaccaacctcccacacctgcgcgccatccaagaacgctactacttcctgagcatccgctacctcgcctccatcatgatcgccgtggccaaagcagaccccaccctgtgggaagaactcgacctgcgcatcaccgacgccttaacaccagtcaccgcaggggaagtgatgatccaatcctccaccctgtccaaacgcatcgccgcctggatcaaagaactcgaccccgaacccacaccagagcccataccgaaagaggactatgttcacgtccacaccactgatgaggcgacctatgtccgcatcaaaatcagcggccccaaccgcctgatcctcaatgacatcatcacccaactcaaagacacagacaccgaggacagcctgcctgaagcgctcatggcgttcctgatggagaaaatccagttaaagatcaccaagtaccttttcaccccacataagcaccctgagcaggtgtggtcaccggactacggtgacattggtcccgaagcctatgccaatgccaccctcgtgtgcgccaaggacttagatgaggtcgctggagccacggagaagagctacaccccgagtgagaagatgaaagccctgatcagagctcgggatgggcattgccgcttcccagggtgttgcgtcccggcgagtaaatgccaggtcgatcacattatcccgtgggcggagggcggcccgacagcggcgtggaacctgcagttgttgtgccagcggcatcacaatatgaaaaccgat

SEQ ID NO: 1408 - protein, 263 aa, Corynebacterium glutamicum
NNGLNAMAAMTNLPHLRAIQERYYFLSIRYLASIMIAVAKADPTLWEELDLRITDALTPVTAGEVMIQSSTLSKRIAAWIKELDPEPTPEPIPKEDYVHVHTTDEATYVRIKISGPNRLILNDIITQLKDTDTEDSLPEALMAFLMEKIQLKITKYLFTPHKHPEQVWSPDYGDIGPEAYANATLVCAKDLDEVAGATEKSYTPSEKMKALIRARDGHCRFPGCCVPASKCQVDHIIPWAEGGPTAAWNLQLLCQRHHNMKTD

SEQ ID NO: 1409 - DNA, 408 bp, Corynebacterium glutamicum
  CDS (101)..(385): RXN03032
cctggtcataggatacttagctcaaccacacggtcagggccagcaattcctcacgttttaccaactccgtaagcacaccatcatggcctggtgcgccgctatgaccgacggggacttagacgctgatatctcaccccgccagatcgggttgatgaccacccgaaccgtggtcgaaatcgttcgactacgccacatgattgcccaacaactagaaagagccacgatcatggaaaacgagtacctcaaagaaatcgcagcgctgaagaaagaactcgcgcactacaagcaaaaagaccatcagaatcaaatggtgatcgatatcttgggaaaagctattgggaccaggcccaatcctggcgagggcttagacgaggaggacgccacctaaacgtggatgagcaacgcgcc

SEQ ID NO: 1410 - protein, 95 aa, Corynebacterium glutamicum
MTDGDLDADISPRQIGLMTTRTVVEIVRLRHMIAQQLERATIMENEYLKEIAALKKELAHYKQKDHQNQMVIDILGKAIGTRPNPGEGLDEEDAT

SEQ ID NO: 1411 - DNA, 683 bp, Corynebacterium glutamicum
  CDS (1)..(660): RXN03034
ttcccaccagatcgaatctccgccaacgggcgacgctattacgagccacaaacacgactcgagttcatgcggatctacaccaccctgccgcacggctaccgccagcccttccttaaagccaacaacatcggccactgcaccgttcgaacctggctagcagcaataagcaccttcagccgacttccccatgcttttgatgatgcccaccgcttcgggatcgaacgcaccaccccagtcgacgatgtcaccacactaacggctgatgacaaacgtgacctggtcataggatacttagctcaaccacacggtcagggccagcaattcctcacgttttaccaactccgtaagcacaccatcatggcctggtgcgccgctatgaccgacggggacttagacgctgatatctcaccccgccagatcgggttgatgaccacccgaaccgtggtcgaaatcgttcgactacgccacatgattgcccaacaactagaaagagccacgatcatggaaaacgagtacctcaaagaaatcgcagcgctgaagaaagaactcgcgcactacaagcaaaaagaccatcagaatcaaatggtgatcgatatcttgggaaaagctattgggaccaggcccaatcctggcgagggcttagacgaggaggacgccacctaaacgtggatgagcaacgcgcc

SEQ ID NO: 1412 - protein, 220 aa, Corynebacterium glutamicum
FPPDRISANGRRYYEPQTRLEFMRIYTTLPHGYRQPFLKANNIGHCTVRTWLAAISTFSRLPHAFDDAHRFGIERTTPVDDVTTLTADDKRDLVIGYLAQPHGQGQQFLTFYQLRKHTIMAWCAAMTDGDLDADISPRQIGLMTTRTVVEIVRLRHMIAQQLERATIMENEYLKEIAALKKELAHYKQKDHQNQMVIDILGKAIGTRPNPGEGLDEEDAT

SEQ ID NO: 1413 - DNA, 408 bp, Corynebacterium glutamicum; identical to SEQ ID NO: 1409
  CDS (101)..(385): FRXA00063

SEQ ID NO: 1414 - protein, 95 aa, Corynebacterium glutamicum; identical to SEQ ID NO: 1410

SEQ ID NO: 1415 - DNA, 309 bp, Corynebacterium glutamicum
  CDS (101)..(286): RXN03037
cgctaaaagacaaatgacagcgaagctgcattcggatacacacctgaagaacactcttcaccactagcattccaccaacgcctcggaaagggctatctccatgtctgttgacgatctttacgctgttgctctcgatactcacaccggtaagcctatcccctgcgtactctgtgaaaatgctccacagattgttatctacgatggttgctgctcgcttgcatatacccaagcacttggcgatctcgccgaagcggaatactacggcgccgatcttgctgcagctgcctaaacaaacttcatagaacgaca

SEQ ID NO: 1416 - protein, 62 aa, Corynebacterium glutamicum
MSVDDLYAVALDTHTGKPIPCVLCENAPQIVIYDGCCSLAYTQALGDLAEAEYYGADLAAAA

SEQ ID NO: 1417 - DNA, 621 bp, Corynebacterium glutamicum
  CDS (101)..(598): RXN03041
  modified_base (473): a, t, c, or g
  modified_base (606): a, t, c, or g
accgaggaactgaaggaaaatgtaggtgtcggggcttagagaaacaaaaaaggctgctacgcggacagcattgtcacgtgctgctgcggagatcgccttgatggaaggccctgaggcgttcacggttgcggccattgcagctgcagccggggtctcccccaggacttttcataactacttcccttctcgggaagacgcattggtgcaatttgtggtcattcgcgttcaggaactcacggatcagctatacgagtttcctacaagcgtgcccccacgagatgccattgaacaattggtgataaaccaattgcgggatggcgatgacgctatggattctttcagcgcaatgtttcgaatcggtgagatccttgaaaatcttgaccccatcaagtgtgttatcgataaggagcgactcattgctccgttgcttgagttcatggttgaacgtgacaaagaccttgacaagttcgatngcggcaactctgatccatttgcatgcagcggcaattgcaacctcgctgcatacgttttaccaagcttccgagccccgggacatagaagatggagtcgcattgatccgtcgggcatgcgcctggattaagaaantaaaaatctstgaca

SEQ ID NO: 1418 - protein, 166 aa, Corynebacterium glutamicum
  MOD_RES (125): Cys, Arg, Ser, or Gly
MEGPEAFTVAAIAAAAGVSPRTFHNYFPSREDALVQFVVIRVQELTDQLYEFPTSVPPRDAIEQLVINQLRDGDDAMDSFSAMFRIGEILENLDPIKCVIDKERLIAPLLEFMVERDKDLDKFDXGNSDPFACSGNCNLAAYVLPSFRAPGHRRWSRIDPSGMRLD

SEQ ID NO: 1419 - DNA, 627 bp, Corynebacterium glutamicum
  CDS (101)..(604): FRXA02892
accgaggaactgaaggaaaatgtaggtgtcggggcttagagaaacaaaaaaggctgctacgcggacagcattgtcacgtgctgctgcggagatcgccttgatggaaggccctgaggcgttcacggttgcggccattgcagctgcagccggggtctcccccaggacttttcataactacttcccttctcgggaagacgcattggtgcaatttgtggtcattcgcgttcaggaactcacggatcagctatacgagtttcctacaagcgtgcccccacgagatgccattgaacaattggtgataaaccaattgcgggatggcgatgacgctatggattctttcagcgcaatgtttcgaatcggtgagatccttgaaaatcttgaccccatcaagtgtgttatcgataaggagcgactcattgctccgttgcttgagttcatggttgaacgtgacaaagaccttgacaagttcgatgcggcaactctgatccatttgcatgcagcggcaattgcaacctcgctgcatacgttttaccaagcttccgagccccgggacatagaagatggagtcgcattgatccgtcgggcatgcgcctggattaagaaataaaaattgtggcgtgtgaacct

SEQ ID NO: 1420 - protein, 168 aa, Corynebacterium glutamicum
MEGPEAFTVAAIAAAAGVSPRTFHNYFPSREDALVQFVVIRVQELTDQLYEFPTSVPPRDAIEQLVINQLRDGDDAMDSFSAMFRIGEILENLDPIKCVIDKERLIAPLLEFMVERDKDLDKFDAATLIHLHAAAIATSLHTFYQASEPRDIEDGVALIRRACAWIKK

SEQ ID NO: 1421 - DNA, 1096 bp, Corynebacterium glutamicum
  CDS (101)..(1096): RXN03045
agcttttctatttcgaaaaatagccttgtattcgaaaatttgatcgggtatggtggttggtattagcacagggaactaaacgggaaagggggaagacaccatgagcatcaccacacacgtccaagcactcaccacagcactcaacgccatcgacaaccatttggccagcatgcttgaccatggtgtcaccccagaccaatacaaggccatcgagcccgacctcatcgccctagaacacaccatcaaccaccacgccaccatcgccgcccaaaccaccgccctcgccgaacgcaccaatgctgcgcagtcgattggctccacccacctcatcgactacctcaccaccaccttcggcctatctaaagcacgcgcccaccaccgcatcaatctcgcccactccctctaccccataccgaagccaaactctggatctggcaacggcggtaatggtggcaatcccgacggtggtcctgatggtggcgactcgggtgatgacgactccggcgatgatgaccccgaccccgaaccggacaagcctgaagacggcaaacctgatagtgataagccccgtaggccacggatcagcgcggaaaaacacgccatcatcaccgacgaactcgcccgcctcaacccgaataccacacccagcgccgaggaactgcgcaaccaagccctgagtcaggcgatctggcgcaccccagaagacctccgcacgtggctacgccaccaggtcaccaccgcgaacaaaaacaaccccaaccccatcaccgccatgaaaaggcgctacctctcagtaggtaaacccgatgccgacaacatggtccgcatcagcggcctcgtgcccgcagccaccgcagcactgatcaccgcgaacaccgcaccgttaaccaaacgcggcaacctcgtggatctaccagcagcagaagatatgcgcacccgcgggcaacgccatgcggacgcgttgcatcacatcatggagatctacaaccacggtattgtcaccccagctcgtggtggaacagccagcatcatcatctccatgaccaccgatgatcttgacgagatcaaccacgccaacagcagtggtgaaagtctg

SEQ ID NO: 1422 - protein, 332 aa, Corynebacterium glutamicum
MSITTHVQALTTALNAIDNHLASMLDHGVTPDQYKAIEPDLIALEHTINHHATIAAQTTALAERTNAAQSIGSTHLIDYLTTTFGLSKARAHHRINLAHSLYPIPKPNSGSGNGGNGGNPDGGPDGGDSGDDDSGDDDPDPEPDKPEDGKPDSDKPRRPRISAEKHAIITDELARLNPNTTPSAEELRNQALSQAIWRTPEDLRTWLRHQVTTANKNNPNPITAMKRRYLSVGKPDADNMVRISGLVPAATAALITANTAPLTKRGNLVDLPAAEDMRTRGQRHADALHHIMEIYNHGIVTPARGGTASIIISMTTDDLDEINHANSSGESL

SEQ ID NO: 1423 - DNA, 359 bp, Corynebacterium glutamicum
  CDS (1)..(336): RXN03046
gcctcaattgctaattccaccctgaatattccagtgggattgggcggctccaatttgctgctcaaggcgcaaaccgcgaccccatctgagcctgcgaatgctcaggacaaactgtaccgtttctgcatcgccaatggtaagagggcattttccgatgcgcagcgattcttgctcaacgccgacgagctcgcggagctttctgattatgagcgtctggcttatgccatcaccttgcttgatcagcctggaaaagaagcagaaggacgcgaactttttcctttcggagcttcgccgccagggctaccgcgctgtcgatttcttggaatcccagactgttgaccagctgaataaccccgatg

SEQ ID NO: 1424 - protein, 112 aa, Corynebacterium glutamicum
ASIANSTLNIPVGLGGSNLLLKAQTATPSEPANAQDKLYRFCIANGKRAFSDAQRFLLNADELAELSDYERLAYAITLLDQPGKEAEGRELFPFGASPPGLPRCRFLGIPDC

SEQ ID NO: 1425 - DNA, 1539 bp, Corynebacterium glutamicum; identical to SEQ ID NO: 1399
  CDS (101)..(1516): RXN03047

SEQ ID NO: 1426 - protein, 472 aa, Corynebacterium glutamicum; identical to SEQ ID NO: 1400

SEQ ID NO: 1427 - DNA, 1539 bp, Corynebacterium glutamicum; identical to SEQ ID NO: 1399
  CDS (101)..(1516): FRXA00036

SEQ ID NO: 1428 - protein, 472 aa, Corynebacterium glutamicum; identical to SEQ ID NO: 1400

SEQ ID NO: 1429 - DNA, 996 bp, Corynebacterium glutamicum; identical to SEQ ID NO: 1401
  CDS (101)..(973): RXN03048

SEQ ID NO: 1430 - protein, 291 aa, Corynebacterium glutamicum; identical to SEQ ID NO: 1402

SEQ ID NO: 1431 - DNA, 996 bp, Corynebacterium glutamicum; identical to SEQ ID NO: 1401
  CDS (101)..(973): FRXA00037

SEQ ID NO: 1432 - protein, 291 aa, Corynebacterium glutamicum; identical to SEQ ID NO: 1402

SEQ ID NO: 1433 - DNA, 1066 bp, Corynebacterium glutamicum
  CDS (101)..(1066): RXN03050
gttaagcctataggaaaaagtgtttgcatatcacccttgtattcgaacacgtgagcgggtagagtgggtggtaacaacacggggaaagggggaagacaccatgagcatcaccacacacgtccaagcactcaccacagcactcaacgccatcgacaaccatttggccagcatgctcgaccatggtgtcaccccagaccaatacaaggccatcgagcccgacctcatcgccctagaacacaccatcaaccaccacgccaccatcgccgcccaaaccacagccctcgccgaacgcaccaacgccgcccacaccattggctccacccacctcatcgactacctcaccaccaccttcggactatccaaagcacgcgcccaccaccgcatcaatctcgcccactccctctaccccataccgaagccaaaccctggatctggcaacggcggtaatggtggcaatcccgacggcggtcctgatggtggcgactcgggtgatgacgactccggcgacgatgaccccgaccccgaaccggacaagcctgaagacggcaaacctgatggtgataagcctcgtgggccacggatcagcgcggaaaaacacgccatcatcaccgacgaactcgcccgcctcaacccgaataccacacccagcgccgaggagctacgcacccaagccctgagtcaagcgatctggcgcaccccagaagacctccgcacgtggctacgccaccacgtcaccaccgccaataaaaacaaccccaaccccatcaccgccatgaaaaggcgctacctcgctgtaggtaaacccgatgccgacaacatggtccgcatcagcggcctcgtgcccgcagccaccgcagcactgatcaccgcgaacaccgcaccgttaaccaaacgcggcaacctcgtggatctacccgcagcagaagatatgcgcacccgcgggcaacgccatgcggacgcgttgcatcacatcatggagatctacaaccacggtattgtcaccccagctcgtggtggaacagccagcatcatcatctccatgaccaccgatgatcttgatgagatc

SEQ ID NO: 1434 - protein, 322 aa, Corynebacterium glutamicum
MSITTHVQALTTALNAIDNHLASMLDHGVTPDQYKAIEPDLIALEHTINHHATIAAQTTALAERTNAAHTIGSTHLIDYLTTTFGLSKARAHHRINLAHSLYPIPKPNPGSGNGGNGGNPDGGPDGGDSGDDDSGDDDPDPEPDKPEDGKPDGDKPRGPRISAEKHAIITDELARLNPNTTPSAEELRTQALSQAIWRTPEDLRTWLRHHVTTANKNNPNPITAMKRRYLAVGKPDADNMVRISGLVPAATAALITANTAPLTKRGNLVDLPAAEDMRTRGQRHADALHHIMEIYNHGIVTPARGGTASIIISMTTDDLDEI

SEQ ID NO: 1435 - DNA, 1558 bp, Corynebacterium glutamicum
  CDS (12)..(1535): RXN03053
gaggtaaaggattccacttcacctcgactgagtttgccggttcttattctttggtcaccaatggtcttaacgatgttgctggcgaatacgtcggtgtcatgcgtggcgatgtcaacaactccgctgtgctttttgatgtggatcgctggtcgggacatgtcgtatgcgcagatagctcgattaatacatcaccactacttaagcgtccccgtgtcgttgacatgtgggggtcgaagatttctcaggcagcgctactgaataaccgtcgcgtagtgcacctggtgctcaatggtgccaagctcgatgaaatgggaccaaagctagaatccatgaccgctcatgtggatatgactagcggagatctcaacatgttcgagctgtttggtaagcaagaagatgagctgtcgctgtattccacacacatggacaaaatcgtgtttatgaccgagcaggcattgggcgataagacctctgagctggcgctattgcgcggaaagctcaaagaaattattacagccttttatgtggatatgaaaatgtgggctcttaatgccggtgaaaaccgtgacaagctgcgtcttgttggtgtgcctcatgagcagatcccgttgctctctgtcttcgtgtcctatttggatcaagaatatgagcgccagaaatatgagggaaccaaagaccctgaaatgtttcgtgccatttctgtgctgcgactgacctataaggatttgctcgatactcatggcgatctgtttaatcagcacacggcagatggcattgattctgtgaactctgcacgccgcgtgatctatgatttttctggagtgctgcgacgtggcgcaggtgtcgcgatggcacagctggttaacgtgattggttttgctgtggagacgcttggtcaaggcgatgtggtcatcattcacggtgctgatggcattgtcgatgttgatgttcaggattatttggctaatcagttcgcatatatggctgagcgtggtgggcgagtggcgtatctctacagctcgatggacgcgatgcttggcactgttggcttcaatcaattccaacgtgctgcgtacaccattttgggcccgatgaacgttgactcggtggatacttatcaatctctgattaatagtcagatcccgatggacttggcacggttggtgacaacgcagaattctggtgcgagctatttgcgccgaggatctaccaatgtggtgtttgaaaccaaccttgcgttgggcgttaatccttatatggagcagcgtcgcaagattgaagcacagcgaggtcagcgacgatccaagcgagacaagcactacggtggtggcacgacgatggtgggcacagcggatcttgatgttgtcgcaattcaggcgaaggccgagcaccgcgaagagcgctttgatgagaaatctgcgcgcaagatgaaggagcttgatgatgtagaagcgaaagaactagctttgaaaactgggccgaagaatcttgatgatgcgcttgcacaggtggagaagaagcgcctggcgaagcggtagttgttggctgtggtgaataa

SEQ ID NO: 1436 - protein, 508 aa, Corynebacterium glutamicum
FHFTSTEFAGSYSLVTNGLNDVAGEYVGVMRGDVNNSAVLFDVDRWSGHVVCADSSINTSPLLKRPRVVDMWGSKISQAALLNNRRVVHLVLNGAKLDEMGPKLESMTAHVDMTSGDLNMFELFGKQEDELSLYSTHMDKIVFMTEQALGDKTSELALLRGKLKEIITAFYVDMKMWALNAGENRDKLRLVGVPHEQIPLLSVFVSYLDQEYERQKYEGTKDPEMFRAISVLRLTYKDLLDTHGDLFNQHTADGIDSVNSARRVIYDFSGVLRRGAGVAMAQLVNVIGFAVETLGQGDVVIIHGADGIVDVDVQDYLANQFAYMAERGGRVAYLYSSMDAMLGTVGFNQFQRAAYTILGPMNVDSVDTYQSLINSQIPMDLARLVTTQNSGASYLRRGSTNVVFETNLALGVNPYMEQRRKIEAQRGQRRSKRDKHYGGGTTMVGTADLDVVAIQAKAEHREERFDEKSARKMKELDDVEAKELALKTGPKNLDDALAQVEKKRLAKR

SEQ ID NO: 1437 - DNA, 1559 bp, Corynebacterium glutamicum
  CDS (1)..(1536): FRXA02885
cgaggtaaaggattccacttcacctcgactgagtttgccggttcttattctttggtcaccaatggtcttaacgatgttgctggcgaatacgtcggtgtcatgcgtggcgatgtcaacaactccgctgtgctttttgatgtggatcgctggtcgggacatgtcgtatgcgcagatagctcgattaatacatcaccactacttaagcgtccccgtgtcgttgacatgtgggggtcgaagatttctcaggcagcgctactgaataaccgtcgcgtagtgcacctggtgctcaatggtgccaagctcgatgaaatgggaccaaagctagaatccatgaccgctcatgtggatatgactagcggagatctcaacatgttcgagctgtttggtaagcaagaagatgagctgtcgctgtattccacacacatggacaaaatcgtgtttatgaccgagcaggcattgggcgataagacctctgagctggcgctattgcgcggaaagctcaaagaaattattacagccttttatgtggatatgaaaatgtgggctcttaatgccggtgaaaaccgtgacaagctgcgtcttgttggtgtgcctcatgagcagatcccgttgctctctgtcttcgtgtcctatttggatcaagaatatgagcgccagaaatatgagggaaccaaagaccctgaaatgtttcgtgccatttctgtgctgcgactgacctataaggatttgctcgatactcatggcgatctgtttaatcagcacacggcagatggcattgattctgtgaactctgcacgccgcgtgatctatgatttttctggagtgctgcgacgtggcgcaggtgtcgcgatggcacagctggttaacgtgattggttttgctgtggagacgcttggtcaaggcgatgtggtcatcattcacggtgctgatggcattgtcgatgttgatgttcaggattatttggctaatcagttcgcatatatggctgagcgtggtgggcgagtggcgtatctctacagctcgatggacgcgatgcttggcactgttggcttcaatcaattccaacgtgctgcgtacaccattttgggcccgatgaacgttgactcggtggatacttatcaatctctgattaatagtcagatcccgatggacttggcacggttggtgacaacgcagaattctggtgcgagctatttgcgccgaggatctaccaatgtggtgtttgaaaccaaccttgcgttgggcgttaatccttatatggagcagcgtcgcaagattgaagcacagcgaggtcagcgacgatccaagcgagacaagcactacggtggtggcacgacgatggtgggcacagcggatcttgatgttgtcgcaattcaggcgaaggccgagcaccgcgaagagcgctttgatgagaaatctgcgcgcaagatgaaggagcttgatgatgtagaagcgaaagaactagctttgaaaactgggccgaagaatcttgatgatgcgcttgcacaggtggagaagaagcgcctggcgaagcggtagttgttggctgtggtgaataa

SEQ ID NO: 1438 - protein, 512 aa, Corynebacterium glutamicum
RGKGFHFTSTEFAGSYSLVTNGLNDVAGEYVGVMRGDVNNSAVLFDVDRWSGHVVCADSSINTSPLLKRPRVVDMWGSKISQAALLNNRRVVHLVLNGAKLDEMGPKLESMTAHVDMTSGDLNMFELFGKQEDELSLYSTHMDKIVFMTEQALGDKTSELALLRGKLKEIITAFYVDMKMWALNAGENRDKLRLVGVPHEQIPLLSVFVSYLDQEYERQKYEGTKDPEMFRAISVLRLTYKDLLDTHGDLFNQHTADGIDSVNSARRVIYDFSGVLRRGAGVAMAQLVNVIGFAVETLGQGDVVIIHGADGIVDVDVQDYLANQFAYMAERGGRVAYLYSSMDAMLGTVGFNQFQRAAYTILGPMNVDSVDTYQSLINSQIPMDLARLVTTQNSGASYLRRGSTNVVFETNLALGVNPYMEQRRKIEAQRGQRRSKRDKHYGGGTTMVGTADLDVVAIQAKAEHREERFDEKSARKMKELDDVEAKELALKTGPKNLDDALAQVEKKRLAKR

SEQ ID NO: 1439 - DNA, 552 bp, Corynebacterium glutamicum
  CDS (101)..(529): RXN03055
aaggtcagccgtatttcggtcagtcagcaactaattacgcttatcttccgtgtacgatagaccgtagttaacataaggaatggaataggagaattgcggcatgtattccgacaagctgattctcttgttcctttctgagcaggattcaagctatgaatgctgcgtaggtttattagatggctcagatggacgtgattatattgaaaagcttctgaagggtaggaagctgaagaaccattttcttgaatgggaagatattaacaaggctgatgttgctcgtgaagaaatatataaagggcaattggtgcatctggtgtttgtgacggctctttccacgcctggtgaaatttcttttgtttttccaggtcaatctcttatgagtgcaacactcgaagaagactttgctgcgcttgtgctcgaagaggagcgcacatcatttagacctgaactgtctcacctgtggtcactccccgtagggtgggtagctccggggcttgagggtttcgtggagcgtaattccgaggcagcttgaaccaccgctttctgagccgg

SEQ ID NO: 1440 - protein, 143 aa, Corynebacterium glutamicum
MYSDKLILLFLSEQDSSYECCVGLLDGSDGRDYIEKLLKGRKLKNHFLEWEDINKADVAREEIYKGQLVHLVFVTALSTPGEISFVFPGQSLMSATLEEDFAALVLEEERTSFRPELSHLWSLPVGWVAPGLEGFVERNSEAA

SEQ ID NO: 1441 - DNA, 552 bp, Corynebacterium glutamicum
  CDS (101)..(529): FRXA00261
aaggtcagccgtatttcggtcagtcagcaactaattacgcttatcttccgtgtacgatagaccgtagttaacataaggaatggaataggagaattgcggcatgtattccgacaagctgattctcttgttcctttctgagcaggattcaagctatgaatgctgcgtaggtttattagatggctcagatggacgtgattatattgaaaagcttctgaagggtaggaagctgaagaaccattttcttgaatgggaagatattaacaaggctgatgttgctcgtgaagaaatatataaagggcaattggtgcatctggtgtttgtgacggctctttccacgcctggtgaaatttcttttgtttttccaggtcaatctctcatgagtgcaacactcgaagaagactttgctgcacttgtgctcgaagaggagcgcacatcatttagacctgatctgtctcacttgtggtcactccccgtagggtgggtagctccggggcttgagggtttcgtggagcgtaattcagaggcagcttgaaccaccgctctttgagccgg

SEQ ID NO: 1442 - protein, 143 aa, Corynebacterium glutamicum
MYSDKLILLFLSEQDSSYECCVGLLDGSDGRDYIEKLLKGRKLKNHFLEWEDINKADVAREEIYKGQLVHLVFVTALSTPGEISFVFPGQSLMSATLEEDFAALVLEEERTSFRPDLSHLWSLPVGWVAPGLEGFVERNSEAA

SEQ ID NO: 1443 - DNA, 552 bp, Corynebacterium glutamicum; identical to SEQ ID NO: 1439
  CDS (101)..(529): FRXA02888

SEQ ID NO: 1444 - protein, 143 aa, Corynebacterium glutamicum; identical to SEQ ID NO: 1440

SEQ ID NO: 1445 - DNA, 603 bp, Corynebacterium glutamicum
  CDS (101)..(580): RXN03059
gtgtcattttcttggcggacggtcgtatcgtgaaccagttgtttgatcccaccatcgaggaaatcttggccacgatgaacggaattgaggatattgcctaatgaattccggttccacaatgcgcagaatcagtctgcgcaatattggcgcgcacaaggtcaggctgtttttgacagttctggcagtggtgctcggcacgtcttttgtttccggcgcgatgatgtttaccaacgcgctgtcctccacttttgatgaggctattgccagcagctttgacggcgtggatgtggtggtttcaccaaacggtgcatcagaggtgcagggtgttcctgttgagacggttgaatctttgcgtgaggattcccgcatcaaccatctcaacatcaacggttcccagactgtcgttctggcggatgctgattccaaggcaattcaaacgactgggggatcgtcgttaagcatttattacagcgcggacgacgcggttgcccaggcacctgaattggctgagggagaggcaccgactggcaccgaagaggtgcttgcctcgaaggcgggcgctgaggcgaatggcctggagtaggggaccagatcttggtcgtg

SEQ ID NO: 1446 - protein, 160 aa, Corynebacterium glutamicum
MNSGSTMRRISLRNIGAHKVRLFLTVLAVVLGTSFVSGAMMFTNALSSTFDEAIASSFDGVDVVVSPNGASEVQGVPVETVESLREDSRINHLNINGSQTVVLADADSKAIQTTGGSSLSIYYSADDAVAQAPELAEGEAPTGTEEVLASKAGAEANGLE

SEQ ID NO: 1447 - DNA, 603 bp, Corynebacterium glutamicum; identical to SEQ ID NO: 1445
  CDS (101)..(580): FRXA02899

SEQ ID NO: 1448 - protein, 160 aa, Corynebacterium glutamicum; identical to SEQ ID NO: 1446

SEQ ID NO: 1449 - DNA, 622 bp, Corynebacterium glutamicum
  CDS (101)..(622): RXN03062
gatgagtattctctccgaggcaacgaagttaatatgtccatgagggcgaagttgtagacaatatttggcccatatggataattgacaggagtttaacgccatggaaaccccaacccaagacatggatgtccgctggttatacacccaaagccagctcaaactccgcgaaattctccccacaaacaaaaccttcgatgtcatccaaatcagcgaactcgttgaccccaccgacttcatcaggcccaacagcgtggtcttatccgttggcatcgccttcgcagaaacgcccgacgggcttcgcgattgggcacaccgactcgccgacgcaggggtcatcgcgatcgggttcggctccggcctcaccttcccacaggttccgcaggcgcttatcgacgcctccctccaccttggcctcggcctctttgaagtcccccgtgaaattccatttatctcgatcacctccagcgtgcgtgatgagcaaacccgccgtgccggccgcctgcaacaagaactcctcctggaacaggaacggcttaactccatcgccatctccggtggcatcgaagccctgtgccgtgctgccgccgactatttgggtggtgcagtaaccatcgtggacagc

SEQ ID NO: 1450 - protein, 174 aa, Corynebacterium glutamicum
METPTQDMDVRWLYTQSQLKLREILPTNKTFDVIQISELVDPTDFIRPNSVVLSVGIAFAETPDGLRDWAHRLADAGVIAIGFGSGLTFPQVPQALIDASLHLGLGLFEVPREIPFISITSSVRDEQTRRAGRLQQELLLEQERLNSIAISGGIEALCRAAADYLGGAVTIVDS

SEQ ID NO: 1451 - DNA, 786 bp, Corynebacterium glutamicum
  CDS (101)..(763): RXN03066
aactgttggcatggcgaagtacaatgttcgtgcaactggtcacgtggagcgcatcgtccgcgaaatcaccgcggcgtaatagcaccagcttaaaaaccttatgacatcagacaaagacactgaacaattggaagcggcaggcactgaaattttaatgcctcgccgccgtccggcacagcagcgcagtcgtgaacgattcaatcgaatcctcaccgctgcgcgttcagtgcttgtcgatctaggttttgaatcgttcacgtttgatgaagtcgctaagcgtgcagaggtaccgatcggcacgctgtaccaattctttgccaataagtatgtattgatctgcgaattggatcgtgtggataccgcagaagctgtcgcggagttgaagaaattctccgatcaggttcctgcgttgcagtggccggatatccttgatgaattcattgagcacttggctaggctctggcgcgatgatccgtctcggcgggccgtgtggcatgccatccagtccacgccggcaactcgtgcgacagctgcggcgacggaaaaagagatgctggaaatcatcgcggaagttatgcgcccgcttgcccgcggtgccggctacgaggagcgcatgtcactggcgggattgctggtgcacacggtaagttccctgcttaactatgccgtgcgtgatgtcaatagttccgaagaggatttcgacagcatcgtggaagaaataaaacgaatgctgatttcttacctcttctccgtggctactggatagtcaacacgcacgttccaccg

SEQ ID NO: 1452 - protein, 221 aa, Corynebacterium glutamicum
MTSDKDTEQLEAAGTEILMPRRRPAQQRSRERFNRILTAARSVLVDLGFESFTFDEVAKRAEVPIGTLYQFFANKYVLICELDRVDTAEAVAELKKFSDQVPALQWPDILDEFIEHLARLWRDDPSRRAVWHAIQSTPATRATAAATEKEMLEIIAEVMRPLARGAGYEERMSLAGLLVHTVSSLLNYAVRDVNSSEEDFDSIVEEIKRMLISYLFSVATG

SEQ ID NO: 1453 - DNA, 786 bp, Corynebacterium glutamicum
  CDS (101)..(763): FRXA02876
aactgttggcatggcgaagtacaatgttcgtgcaactggtcacgtggagcgcatcgtccgcgaaatcaccgcggcgtaatagcaccagcttaaaaaccttatgacatcagacaaagacactgaacaattggaagcggcaggcactgaaattttaatgcctcgccgccgtccggcacagcagcgcagtcgtgaacgattcaatcgaatcctcaccgctgcgcgttcagtgcttgtcgatctaggttttgaatcgttcacgtttgatgaagtcgctaagcgtgcagaggtaccgatcggcacgctgtaccaattctttgccaataagtatgtattgatctgcgaattggatcgtgtggataccgcagaagctgtcgcggagttgaagaaattctccgatcaggttcctgcgttgcagtggccggatatccttgatgaattcattgagcacttggctaggctctggcgcgatgatccgtctcggcgggccgtgtggcatgccatccagtccacgccggcaactcgtgcgacagctgcggcgacggaaaaagagatgctggaaatcatcgcggaagttatgcgcccgcttgcccgcggtgccggctacgaggagcgcatgtcactggcgggattgctggtgcacacggtaagttccctgcttaactatgccgtgcgtgatgtcaatagttccgaagaggatttcgacagcatcgtggaagaaatcaaacgaatgctgatttcttacctcttctccgtggctactggatagtcaacacgcacgtcgccacc

SEQ ID NO: 1454 - protein, 221 aa, Corynebacterium glutamicum; identical to SEQ ID NO: 1452

SEQ ID NO: 1455 - DNA, 294 bp, Corynebacterium glutamicum
  CDS (101)..(271): RXN03067
ttgctgttgttggcatttccccggatccggtggacaagctggtaagttccgtgaggaccatgagctgaacttccctcttctttccgatgaggacaagtctgtgatgactgcgtggggtgcgtttggtgagaagaagaattacggcaagattgttcagggtgtaattcgttccacattcctcatcaatgctgacggaactgttggcatggcgaagtacaatgttcgtgcaactggtcacgtggagcgcatcgtccgcgaaatcaccgcggcgtaatagcaccagcttaaaaacct

SEQ ID NO: 1456 - protein, 57 aa, Corynebacterium glutamicum
VMTAWGAFGEKKNYGKIVQGVIRSTFLINADGTVGMAKYNVRATGHVERIVREITAA

SEQ ID NO: 1457 - DNA, 143 bp, Corynebacterium glutamicum
  CDS (1)..(120): RXN03068
accaaggaagcatgcgatttccgtgattctttgagcaacctcaacgatctcgacattgctgttgttggcatttccccggatccggtggacaagctggtaagttccgtgaggaccatgagctgaacttccctcttctttccgat

SEQ ID NO: 1458 - protein, 40 aa, Corynebacterium glutamicum
TKEACDFRDSLSNLNDLDIAVVGISPDPVDKLVSSVRTMS

SEQ ID NO: 1459 - DNA, 753 bp, Corynebacterium glutamicum
  CDS (101)..(730): RXN03073
cgaaacatctaggcaacccgacttttatgtccctgcttgagttgaaaactgctgtcgatcaaaggtgccccaattgtttcatgccgtgagttttgcattaatggactccgtaaatgtcctgctcattggcataatcgtcgcgattgctgctttgctgcctcgcaagggtaaatatgggccaatcgccacgctactggttgccggcgattggcttggcgttttcctcctcagtattttggtgatgctcgtttttgatggactagaggatttagttcagggctttttggattcaatctggttcggagtcatccttcttgtaactggcatcgtttccttcgttgcgacactggtttctaaaaccgacagcactagaaagcttgatggattcctagcgccagtaaaaactcctagttggaaaactgttggagccggattgatccttggaatcgttcagtcagcgacatctgtacctttttatgcagggcttggatatttgagcgttggcaatttcagtccagaaattaggtatggcggacttgtggtctatgcgaccttggctctgagtctgccgattatcgtggcaattctcgttggaatggttcgcaaataccctgaaagtcctgttggtaggttgtttgaactgattggtcaaaataaagagagagtcaccaaatggtcgggctatctcgtgtcactggttctgtgcataatgggcattacttcgatcctgtaactagcgcatgtactcatgag

SEQ ID NO: 1460 - protein, 210 aa, Corynebacterium glutamicum
MDSVNVLLIGIIVAIAALLPRKGKYGPIATLLVAGDWLGVFLLSILVMLVFDGLEDLVQGFLDSIWFGVILLVTGIVSFVATLVSKTDSTRKLDGFLAPVKTPSWKTVGAGLILGIVQSATSVPFYAGLGYLSVGNFSPEIRYGGLVVYATLALSLPIIVAILVGMVRKYPESPVGRLFELIGQNKERVTKWSGYLVSLVLCIMGITSIL

SEQ ID NO: 1461 - DNA, 574 bp, Corynebacterium glutamicum
  CDS (101)..(574): FRXA02905
cgaaacatctaggcaacccgacttttatgtccctgcttgagttgaaaactgctgtcgatcaaaggtgccccaattgtttcatgccgtgagttttgcattaatggactccgtaaatgtcctgctcattggcataatcgtcgcgattgctgctttgctgcctcgcaagggtaaatatgggccaatcgccacgctactggttgccggcgattggcttggcgttttcctcctcagtattttggtgatgctcgtttttgatggactagaggatttagttcagggctttttggattcaatctggttcggagtcatccttcttgtaactggcatcgtttccttcgttgcgacactggtttctaaaaccgacagcactagaaagcttgatggattcctagcgccagtaaaaactcctagttggaaaactgttggagccggattgatccttggaatcgttcagtcagcgacatctgtacctttttatgcagggcttggatatttgagcgttggcaatttcagtccagaaattaggtatggcggacttgtggtctatgcgaccttggctctgagtctgccgatt

SEQ ID NO: 1462 - protein, 158 aa, Corynebacterium glutamicum
MDSVNVLLIGIIVAIAALLPRKGKYGPIATLLVAGDWLGVFLLSILVMLVFDGLEDLVQGFLDSIWFGVILLVTGIVSFVATLVSKTDSTRKLDGFLAPVKTPSWKTVGAGLILGIVQSATSVPFYAGLGYLSVGNFSPEIRYGGLVVYATLALSLPI

SEQ ID NO: 1463 - DNA, 474 bp, Corynebacterium glutamicum
  CDS (101)..(451): RXN03085
taagcaggattacgacaagcgccaagatatcaagcgtcgcaccgaagaacgcgaagtcacccgtgagctcggccgtcgcattaagggaatcaacgcgtaaatgagtattcacatcgcaaaagtccacgacgtcctcaaaggtgaaaaaacctacggaaccaccattttggtggatcggctctggccacgcggtgtgaaaaaagacgaccttgagccagacctctggctcaaaagcgtcgcccccacaaccgaactccgaaaatggttcggccacgacccagctaaattctccgaattcagcacccgttacaccgaagagctcaacgccagcaacgacaaagacctagagacgcttgtcgacgccacctcccgccaccccgtaaccctcctctacggtgctgccgaccgcgaccacaaccacgccattgttctagccaagtggctaaagaaataactccttgcaaatagttgcaa

SEQ ID NO: 1464 - protein, 117 aa, Corynebacterium glutamicum
MSIHIAKVHDVLKGEKTYGTTILVDRLWPRGVKKDDLEPDLWLKSVAPTTELRKWFGHDPAKFSEFSTRYTEELNASNDKDLETLVDATSRHPVTLLYGAADRDHNHAIVLAKWLKK

SEQ ID NO: 1465 - DNA, 1181 bp, Corynebacterium glutamicum
  CDS (1)..(1158): RXN03089
cactccctctaccccataccgaagccaaactctggatctggcaacggcggtaatggtggcaatcccgatggcggtcctgatggtggcgactcgggtgatgacgactccggcgatgatgaccccgaccccgaaccggacaagcctgaagacggcaaacctgatagtgataagccccgtaggccacggatcagcgcggaaaaacacgccatcatcaccgacgaactcgcccgcctcaacccgaataccacacccagcgccgaggaactacgcacccaagccctgagtcaagcgatctggcgcaccccagaagacctccgcacgtggctacgccaccaggtcaccaccgcgaacaaaaacaaccccaaccccatcaccgccatgaaaaggcgctacctctcagtaggtaaacccgatgccgacaacatggtccgcatcagcggcctcgtgcccgcagccaccgcagcactgatcaccgcgaacaccgcaccgttaaccaaacgtggcaacctcgtggatctaccagcagcagaagatatgcgcacccgcgggcaacgccatgcggatgcgttgcatcacatcatggagatctacaaccacggtattgtcaccccagctcgtggtggaacagccagcatcatcatctccatgaccaccgatgatcttgacgagatcaaccacggtgatcatggcgatggcagtctacttaacaacctgtaccccacgaacacgggttactcattgaacttggcggagatcatgaacctcatcgctgcgaaatacgacttcgctgtgctcctcgatggtgagacggggcagccgttgaacgtcaataggatgcagcgctcagcgaacctgactcaacgcatcgcgttgtttgcttctgagttggtgtgctcggcacccaattgtgacaggccgcagttagagtgcgaggttcatcatttagatccctggatgagaggtgggctgaccaacctggtcaatctcacgcatcagtgctttaatcaccacccacgcaacgatgattccaggagtggggtcaatggtaaagggtttatggaccgcgatcccgtcactggcagagtaggtcactactcagcaagtggtgaggggccggtgtttaaccggtcggctgctgctgatcgttccggtggtgcatagtccagacgtaagcattatgg

SEQ ID NO: 1466 - protein, 386 aa, Corynebacterium glutamicum
HSLYPIPKPNSGSGNGGNGGNPDGGPDGGDSGDDDSGDDDPDPEPDKPEDGKPDSDKPRRPRISAEKHAIITDELARLNPNTTPSAEELRTQALSQAIWRTPEDLRTWLRHQVTTANKNNPNPITAMKRRYLSVGKPDADNMVRISGLVPAATAALITANTAPLTKRGNLVDLPAAEDMRTRGQRHADALHHIMEIYNHGIVTPARGGTASIIISMTTDDLDEINHGDHGDGSLLNNLYPTNTGYSLNLAEIMNLIAAKYDFAVLLDGETGQPLNVNRMQRSANLTQRIALFASELVCSAPNCDRPQLECEVHHLDPWMRGGLTNLVNLTHQCFNHHPRNDDSRSGVNGKGFMDRDPVTGRVGHYSASGEGPVFNRSAAADRSGGA

SEQ ID NO: 1467 - DNA, 1575 bp, Corynebacterium glutamicum
  CDS (101)..(1552): FRXA00071
gcttttctatttcgaaaaatagccttgtattcgaaaatttgatcgggtatggtggttggtakwrksrswggkaacwamacggggaaagggggaagacaccatgagcatcaccacacacgtccaagcactcaccacagcactcaacgccatcgacaaccatttggccagcatgctygaccatggtgtcaccccagaccaatacaaggccatcgagcccgacctcatcgccctagaacacaccatcaaccaccacgccaccatcgccgcccaaaccacmgccctcgccgaacgcaccaaygcygcscaswcsattggctccacccacctcatcgactacctcaccaccaccttcggcctatctaaagcacgcgcccaccaccgcatcaatctcgcccactccctctaccccataccgaagccaaactctggatctggcaacggcggtaatggtggcaatcccgacggcggtcctgatggtggcgactcgggtgatgacgactccggcgatgatgaccccgaccccgaaccggacaagcctgaagacggcaaacctgatagtgataagccccgtaggccacggatcagcgcggaaaaacacgccatcatcaccgacgaactcgcccgcctcaacccgaataccacacccagcgccgaggaactrcgcamccaagccctgagtcargcgatctggcgcaccccagaagacctccgcacgtggctacgccaccaggtcaccaccgcgaacaaaaacaaccccaaccccatcaccgccatgaaaaggcgctacctctcagtaggtaaacccgatgccgacaacatggtccgcatcagcggcctcgtgcccgcagccaccgcagcactgatcaccgcgaacaccgcaccgttaaccaaacgtggcaacctcgtggatctaccagcagcagaagatatgcgcacccgcgggcaacgccatgcggatgcgttgcatcacatcatggagatctacaaccacggtattgtcaccccagctcgtggtggaacagccagcatcatcatctccatgaccaccgatgatcttgacgagatcaaccacggtgatcatggcgatggcagtctacttaacaacctgtaccccacgaacacgggttactcattgaacttggcggagatcatgaacctcatcgctgcgaaatacgacttcgctgtgctcctcgatggtgagacggggcagccgttgaacgtcaataggatgcagcgctcagcgaacctgactcaacgcatcgcgttgtttgcttctgagttggtgtgctcggcacccaattgtgacaggccgcagttagagtgcgaggttcatcatttagatccctggatgagaggtgggctgaccaacctggtcaatctcacgcatcagtgctttaatcaccacccacgcaacgatgattccaggagtggggtcaatggtaaagggtttatggaccgcgatcccgtcactggcagagtaggtcactactcagcaagtggtgaggggccggtgtttaaccggtcggctgctgctgatcgttccggtggtgcatagtccagacgtaagcattatgg

SEQ ID NO: 1468 - protein, 484 aa, Corynebacterium glutamicum
  MOD_RES (69): Gln or His
  MOD_RES (70): Thr or Ser
  MOD_RES (189): Asn or Thr
MSITTHVQALTTALNAIDNHLASMLDHGVTPDQYKAIEPDLIALEHTINHHATIAAQTTALAERTDAAXXIGSTHLIDYLTTTFGLSKARAHHRINLAHSLYPIPKPNSGSGNGGNGGNPDGGPDGGDSGDDDSGDDDPDPEPDKPEDGKPDSDKPRRPRISAEKHAIITDELARLNPNTTPSAEELRXQALSQAIWRTPEDLRTWLRHQVTTANKNNPNPITAMKRRYLSVGKPDADNMVRISGLVPAATAALITANTAPLTKRGNLVDLPAAEDMRTRGQRHADALHHIMEIYNHGIVTPARGGTASIIISMTTDDLDEINHGDHGDGSLLNNLYPTNTGYSLNLAEIMNLIAAKYDFAVLLDGETGQPLNVNRMQRSANLTQRIALFASELVCSAPNCDRPQLECEVHHLDPWMRGGLTNLVNLTHQCFNHHPRNDDSRSGVNGKGFMDRDPVTGRVGHYSASGEGPVFNRSAAADRSGGA

SEQ ID NO: 1469 - DNA, 747 bp, Corynebacterium glutamicum
  CDS (101)..(724): RXN03098
gaccgttttgtcgatcgcaccgctgctggctcgcaccatcaacgagatcttcgaaaacggttccgtcaccaccctcttcgagggcgaggcctaaacacccatgcccaccacggacgtcttcaaccgcgtccggttggcattggaacctctagctgatcccgcacgtgccaccggaatggcaagctacatgcgggatcagttttcttttctcggcatcccatccacccccagaaaagaagcctgcaaacccgtgctgtccgcgctaaaagagttggacactgactttgtctcagactgctttggcgcagctgaacgggaataccagtatgtcgcctgcgatcacatcaatcgcgtcggcatcaccgatttaggttttgccaaagcattagtgcagaccaaatcctggtgggacaccgtcgattccctagcaaaaccgatcggcgccaaacacgatgatgatctgatgaaaacgtgggcgcttgatgaggacttctgggtgcgccgcatcgcgatcatccaccaactgggccgcaagaaaaacaccgacgctgccctgctggcctggatcatcgagcagaacctcggctccagcgagttcttcatcaacaaagcgatcggctgggcactgcgggatttcgcccgccacgaccccagctgggtccgggcttttgtcgacgccacggacctttccccactgagccggcgagaagccctgaagaatatttagccctcaggcatcatctgagc

SEQ ID NO: 1470 - protein, 208 aa, Corynebacterium glutamicum
MPTTDVFNRVRLALEPLADPARATGMASYMRDQFSFLGIPSTPRKEACKPVLSALKELDTDFVSDCFGAAEREYQYVACDHINRVGITDLGFAKALVQTKSWWDTVDSLAKPIGAKHDDDLMKTWALDEDFWVRRIAIIHQLGRKKNTDAALLAWIIEQNLGSSEFFINKAIGWALRDFARHDPSWVRAFVDATDLSPLSRREALKNI

SEQ ID NO: 1471 - DNA, 798 bp, Corynebacterium glutamicum
  CDS (101)..(775): RXN03099
ccacgccgtagcgatcattgatcaccttgagcactggggtaatggcattggtggtgcatgatgctgcggaaacgatctgatcatctgcggtgatgtcggtgtggttgatgccgtacacgatgttcttcagatcgcccttgcccggcgcggtgagtacaaccttggcaacgcccttggacttgaggtgctgggacaggccttcgcggtcacgccagcggccggtgttgtctaccacgacggcgtcattgatgccgtattcggtgtaatcaatggtggctgggtcattggagtagatgaccttgattggggtgccgttggcccagatgatgttgttgtcataatcggtggtgatggtgccatcgaatccaccgtggacagaatcacgacgcagcaaggatgcgcgcttgaccaggtcttcttcaccatttttgcggaccacgatggcgcgcagacgagcaccgtcatacagtgcctcgcgggaaaccaggatgcgggccagcaggcgaccgatgcggccgaaaccgtacagcacgatatcagttgggttgatgtcggtttccgcaccaatgaccggcgcgagagcgtcctccaggaaggcacgcaggtcggtgctttcggattcttcgaagctgtaggccagctgtcccaggtcgatcgatgcggtaccaaggttcatatctaccagttcgcgcaaaatatccaaggagctttccagtggaagttccttggatatgatgtggcgggcgtagcggtgagacttgatgatatcgatgtctgagacattcacaaggagacgac

SEQ ID NO: 1472 - protein, 225 aa, Corynebacterium glutamicum
VVDAVHDVLQIALARRGEYNLGNALGLEVLGQAFAVTPAAGVVYHDGVIDAVFGVINGGWVIGVDDLDWGAVGPDDVVVIIGGDGAIESTVDRITTQQGCALDQVFFTIFADHDGAQTSTVIQCLAGNQDAGQQATDAAETVQHDISWVDVGFRTNDRRESVLQEGTQVGAFGFFEAVGQLSQVDRCGTKVHIYQFAQNIQGAFQWKFLGYDVAGVAVRLDDIDV

SEQ ID NO: 1473 - DNA, 300 bp, Corynebacterium glutamicum
  CDS (101)..(277): RXN03104
actgctgggagtagccgaagaggatggtggcgtcagtggtcagggcgtcaacgttgccctgggacagtgcctcaacacaggaagagtaggtgtcgtattcttggagctgaacgcctgggaggacatccttgaccttctgagctggagtggatccggaaacggagcacaggatcaaaccgttatccaagtcctcgagggtttcaatgcgatcgtcatcttggcgaacaagcagagcctggtgggtaagcaggtatgggccaccgaagttgacggactctgaacggccagcgttgatggagt

SEQ ID NO: 1474 - protein, 59 aa, Corynebacterium glutamicum
LELNAWEDILDLLSWSGSGNGAQDQTVIQVLEGFNAIVILANKQSLVGKQVWATEVDGL

SEQ ID NO: 1475 - DNA, 292 bp, Corynebacterium glutamicum
  CDS (101)..(292): RXN03106
aaatgccctcctgaactggaagaatcaagcttgcttagagtcctgattcacctgccagaaaggcacctcacaggtgcaattattacacaaccccacagcgatgtccgcatcctttgatgaccccaacctcatctcgcttgctggactggttccaaccatgcacttagccgatgctgccagcctgtccaccttggcccaggaccggttgagcatcaccggtgataaaggtgccaatgctggtgcgaagatcgcctccctagtcgcgggcatggtcgccggtgctgattccatc

SEQ ID NO: 1476 - protein, 64 aa, Corynebacterium glutamicum
MSASFDDPNLISLAGLVPTMHLADAASLSTLAQDRLSITGDKGANAGAKIASLVAGMVAGADSI

SEQ ID NO: 1477 - DNA, 324 bp, Corynebacterium glutamicum
  CDS (101)..(301): RXN03107
ggatttatatcaatttcagggcgtggcgagcttttagtgattcacgctcctacggtgggtatcacaaatacctcaactagaagtaggagatgagcaccacatgagcgatttttccaacaaggcagaggacctcacaggtaaggctaaagaaggattcggcgaggcaactgataacgagtccctcgctgatgagggccgtgcggatcaggctaaggcagacatcaaggatgctgtcgaaaacgccggtgaaaaggtaaaggacgcagctaacaaggttctgggtgcgttcaagaaggacgactaatcccgtacttgttcaggatt

SEQ ID NO: 1478 - protein, 67 aa, Corynebacterium glutamicum
MSDFSNKAEDLTGKAKEGFGEATDNESLADEGRADQAKADIKDAVENAGEKVKDAANKVLGAFKKDD

SEQ ID NO: 1479 - DNA, 1722 bp, Corynebacterium glutamicum
  CDS (101)..(1699): RXN03113
gttggatcttgcattgaaaaaatgaaaacctcgtcgggaatgcaacttgggatcacgtctcgggcaagaaacgtccttaaaaaaaggggagtgattgtgagtgcttgatttcttagctgcgaacccgctgattgcgctggtggttattttggccgttggtttagcaattggtcagattagggtctttggcctttctttaggtgccgccgcggtgctgtttgtggccctggtggtttcaactgcaaataccgacatcgtcatccccatgattgtttatcagctgggcttggcgatgttcgtttatgtcatcggtttgtccgccggaccagcatttttcagtgagttcgctaaaaagggctggaagctcaccatctttatgctcctgctgctggcaacactgattggtttggcgtgggtgcttattaagtcactggggcttgatgcagcgatcggtaccggtatgttcaccggcgcgctgacctcgactcccggtatggcagcggtcgtggaattgattgaaggaatcgatccaagccttgccagtgaacctgttattggttattccttggcatatccgggagccgtgctgggatccattgtggtggccgcggttggagcgaaactgctcaaagtaaatcaccgggaagatgctcgaaaagaaggcatgatcaccgcaccgctggtgtggaagggtgtgcagctcaaacctggaatcacaggcagggtgggagatcttccacgccttgcaggtgaaagtatcatcgcaacccgcattgtggatgatccacatacacaccgcctcgcggatccagatctgccgattactgaaggcatggaactgttgatcaacggcactgaagaagccgtggatcgggcaattaaggcgttgggtgaagaacgcgaaaccaaaattgaggacacagagctgatctacacccgcctgacggtatctagccctgaggttgcaggtagaaccgttgctgagcttgatactgtagctcacggattcatgattgcccgtatccgccagggcgattctgaggtagtgcctaaacctgacaccgtgatcaactactctgaccgcatccgcgtggtggttgctcctggtcgtgtggctgaagtgcgacgattcttaggggactctgaaaagtcccttgctgatgttaatctgctgcctttagccatcggattatctcttggcctgttgttgggcgcgatcccgattcctcttccaggcggcaccacgatgtcccttggctttggtggcggcccgattattgccggcctgattttgggagcactcaagcacacaggaccgctgacgtggcagatgccgttccacgccaaccgcacgatctccaccttgggcctggcgctgtttttggctggtgtgggtacctctgcaggtgcaggatttagagctgcgcttaccgattcctcctccttgatctacatggccggtggcttggtgatcaccttggcctctgcgctgctgtgtgctgtgatcggcatgtgggtactcaggttgaggtgggatgaagccatgggtgttgccgctggcaccaccacaaatcctgcaattatttcctatctgaatgggcaaaccggaacggatcttgccaacaggggatatgccactgtgtaccccacggcgatgatcggtaaaatcctcggcgcgcagatattgttcttgctgctctaaggtgatttttgggcagtggt

SEQ ID NO: 1480 - protein, 533 aa, Corynebacterium glutamicum
VLDFLAANPLIALVVILAVGLAIGQIRVFGLSLGAAAVLFVALVVSTANTDIVIPMIVYQLGLAMFVYVIGLSAGPAFFSEFAKKGWKLTIFMLLLLATLIGLAWVLIKSLGLDAAIGTGMFTGALTSTPGMAAVVELIEGIDPSLASEPVIGYSLAYPGAVLGSIVVAAVGAKLLKVNHREDARKEGMITAPLVWKGVQLKPGITGRVGDLPRLAGESIIATRIVDDPHTHRLADPDLPITEGMELLINGTEEAVDRAIKALGEERETKIEDTELIYTRLTVSSPEVAGRTVAELDTVAHGFMIARIRQGDSEVVPKPDTVINYSDRIRVVVAPGRVAEVRRFLGDSEKSLADVNLLPLAIGLSLGLLLGAIPIPLPGGTTMSLGFGGGPIIAGLILGALKHTGPLTWQMPFHANRTISTLGLALFLAGVGTSAGAGFRAALTDSSSLIYMAGGLVITLASALLCAVIGMWVLRLRWDEAMGVAAGTTTNPAIISYLNGQTGTDLANRGYATVYPTAMIGKILGAQILFLLL

SEQ ID NO: 1481 - DNA, 1441 bp, Corynebacterium glutamicum
  CDS (101)..(1441): FRXA00506
gttggatcttgcattgaaaaaatgaaaacctcgtcgggaatgcaacttgggatcacgtctcgggcaagaaacgtccttaaaaaaaggggagtgattgtgagtgcttgatttcttagctgcgaacccgctgattgcgctggtggttattttggccgttggtttagcaattggtcagattagggtctttggcctttctttaggtgccgccgcggtgctgtttgtggccctggtggtttcaactgcaaataccgacatcgtcatccccatgattgtttatcagctgggcttggcgatgttcgtttatgtcatcggtttgtccgccggaccagcatttttcagtgagttcgctaaaaagggctggaagctcaccatctttatgctcctgctgctggcaacactgattggtttggcgtgggtgcttattaagtcactggggcttgatgcagcgatcggtaccggtatgttcaccggcgcgctgacctcgactcccggtatggcagcggtcgtggaattgattgaaggaatcgatccaagccttgccagtgaacctgttattggttattccttggcatatccgggagccgtgctgggatccattgtggtggccgcggttggagcgaaactgctcaaagtaaatcaccgggaagatgctcgaaaagaaggcatgatcaccgcaccgctggtgtggaagggtgtgcagctcaaacctggaatcacaggcagggtgggagatcttccacgccttgcaggtgaaagtatcatcgcaacccgcattgtggatgatccacatacacaccgcctcgcggatccagatctgccgattactgaaggcatggaactgttgatcaacggcactgaagaagccgtggatcgggcaattaaggcgttgggtgaagaacgcgaaaccaaaattgaggacacagagctgatctacacccgcctgacggtatctagccctgaggttgcaggtagaaccgttgctgagcttgatactgtagctcacggattcatgattgcccgtatccgccagggcgattctgaggtagtgcctaaacctgacaccgtgatcaactactctgaccgcatccgcgtggtggttgctcctggtcgtgtggctgaagtgcgacgattcttaggggactctgaaaagtcccttgctgatgttaatctgctgcctttagccatcggattatctcttggcctgttgttgggcgcgatcccgattcctcttccaggcggcaccacgatgtcccttggctttggtggcggcccgattattgccggcctgattttgggagcactcaagcacacaggaccgctgacgtggcagatgccgttccacgccaaccgcacgatctccaccttgggcctggcgctgtttttggctggtgtgggtacctctgcaggtgcaggatttagagctgcgcttaccgattcctcc

SEQ ID NO: 1482 - protein, 447 aa, Corynebacterium glutamicum
VLDFLAANPLIALVVILAVGLAIGQIRVFGLSLGAAAVLFVALVVSTANTDIVIPMIVYQLGLAMFVYVIGLSAGPAFFSEFAKKGWKLTIFMLLLLATLIGLAWVLIKSLGLDAAIGTGMFTGALTSTPGMAAVVELIEGIDPSLASEPVIGYSLAYPGAVLGSIVVAAVGAKLLKVNHREDARKEGMITAPLVWKGVQLKPGITGRVGDLPRLAGESIIATRIVDDPHTHRLADPDLPITEGMELLINGTEEAVDRAIKALGEERETKIEDTELIYTRLTVSSPEVAGRTVAELDTVAHGFMIARIRQGDSEVVPKPDTVINYSDRIRVVVAPGRVAEVRRFLGDSEKSLADVNLLPLAIGLSLGLLLGAIPIPLPGGTTMSLGFGGGPIIAGLILGALKHTGPLTWQMPFHANRTISTLGLALFLAGVGTSAGAGFRAALTDSS

SEQ ID NO: 1483 - DNA, 522 bp, Corynebacterium glutamicum
  CDS (101)..(499): RXN03115
ggaactgctggcaggcaacgtccgtgatggcgatggtgtgcttgtcaacgtcgccgacggcggccagaagctcgacgtttccagggcggtctaacggctcgtgggcaagcaggaaaagctgcgcattcctctcgatgttccgggagtggaatcagaagaggtaggtgtagaactgcttgccgaaggctactacctggtagccactttgccggctgtcgcccaggactgtgccctgggtgacgtcgtgcgggcacatcatgttgatgaggtcttggaatttcaagaagtggcagttgctggcggaaacaaaaccctccgggtgctcgttgatgccatcgctgctgaccacgtgcgagcccaactagaaacacttgggctacacgtggaagctcccatgtcagaaatgctaactgtcaatattgcccccgattcaccgtcgcacggtttggagatcctgctcgatgatctgcatgctcagggggtaattttcagggcgttatagagcgcctaattgtagagagc

SEQ ID NO: 1484 - protein, 133 aa, Corynebacterium glutamicum
VGKQEKLRIPLDVPGVESEEVGVELLAEGYYLVATLPAVAQDCALGDVVRAHHVDEVLEFQEVAVAGGNKTLRVLVDAIAADHVRAQLETLGLHVEAPMSEMLTVNIAPDSPSHGLEILLDDLHAQGVIFRAL

SEQ ID NO: 1485 - DNA, 270 bp, Corynebacterium glutamicum
  CDS (101)..(247): RXN03122
atggaccatggcgggatgagtggaatgatgagcgaggaggacatgacagccctcgaggacgcccagggcacccgaggctgcccggctctaccttgagcagatgaccgcccaccatgagggcgcggtcgatatggcccgcgatgaggtcactgatggccagaacccgcaggccatcgctctggctgagcaggtcattgaagatcaggaggccgagatcgccgagatggagcatatgctcaacgagctctgaacaaggacattccccgacca

SEQ ID NO: 1486 - protein, 49 aa, Corynebacterium glutamicum
MTAHHEGAVDMARDEVTDGQNPQAIALAEQVIEDQEAEIAEMEHMLNEL

SEQ ID NO: 1487 - DNA, 474 bp, Corynebacterium glutamicum
  CDS (101)..(451): RXN03134
atgctgtttcatcgctggcgttggctttttcgagccattcgagctcttctccggggagatccagtttgctgatcagcgggtttgtttcgcgtggggcgtggtggcttggcgcgtcggcccaggttcccatgagcatgacatagttgggtcctccggctttggatccgaggccgacggaggattttttccagcctccgaaggattggcgttggacaatggcgccggtgatgccgcggttgacgtaggcgtttccgacatcgacgtggtcaagccaggtgcggacttcgtcggcgtcgagggattggagtccgccggtgagtccgaagtcgttgccgttttggaattcgatggcttcattgaggtcggtggctttcatcaggccgaggactggtccgaatacttctgtgaggtggaagaaggttcctggtttgacgccttctttgatgccgggtgaccagagtcggccggtgtcgt

SEQ ID NO: 1488 - protein, 117 aa, Corynebacterium glutamicum
VAWRVGPGSHEHDIVGSSGFGSEADGGFFPASEGLALDNGAGDAAVDVGVSDIDVVKPGADFVGVEGLESAGESEVVAVLEFDGFIEVGGFHQAEDWSEYFCEVEEGSWFDAFFDAG

SEQ ID NO: 1489 - DNA, 852 bp, Corynebacterium glutamicum
  CDS (101)..(829): RXN03135
ttagcttgtcgacgtccccctcttccaacacctccggctttgtttgtttttccaaccaaccgggctctgctgcggtggcgacggcttttgtggcccactgttggttttggatgagcgctgggttggtgtcgggctcgttgataaatgggacgaggggggcgtcgagaagcgtctctttgctgcggtcttgtgtgtggttggggccgggcgcgggcacgtcgatgagcgtggcgaggtcagatatggaggcgcggaagcggctctcctctcgcttgaaggacgggttgtcggcgtcgaggtcgaagatggcggacatgaagttttcgctcgcggcgttttcctcgaggcggcgcacgaggtaagaaatggccacgtcgaattcttgtgggcgcacggctggtacgtaaagcagcagctcaccgacgtcaacgctgacggcgcgcgcctgatcggacgccatgccctgcagcatttcgaactccacacggtccgctaccccacgctccacagagagcaaatgtgcgaatgctatgtcgaaaaggttgtggccggcaacgcccaggcgcaggccctccatgttttctttgcgcatcgtccaatagaggacgcgcttgtaattggcatcggtggcttgtttggaaggttctgtggcaactggccagccggtgatctgcgcgtggacgtgctccataggcaaattagcacccttgaccaggcgaaccttaacgcccgccccgcctgtgttgacgcgctcgcggccgaactgcgccaagtcctggattgcaccgagggcatcgggaaggtacgcctgcaacacaattccggcttctagttcatgcagctctggattgg

SEQ ID NO: 1490 - protein, 243 aa, Corynebacterium glutamicum
LVLDERWVGVGLVDKWDEGGVEKRLFAAVLCVVGAGRGHVDERGEVRYGGAEAALLSLEGRVVGVEVEDGGHEVFARGVFLEAAHEVRNGHVEFLWAHGWYVKQQLTDVNADGARLIGRHALQHFELHTVRYPTLHREQMCECYVEKVVAGNAQAQALHVFFAHRPIEDALVIGIGGLFGRFCGNWPAGDLRVDVLHRQISTLDQANLNARPACVDALAAELRQVLDCTEGIGKVRLQHNSGF

SEQ ID NO: 1491 - DNA, 852 bp, Corynebacterium glutamicum; identical to SEQ ID NO: 1489
  CDS (101)..(829): FRXA02285

SEQ ID NO: 1492 - protein, 243 aa, Corynebacterium glutamicum; identical to SEQ ID NO: 1490

SEQ ID NO: 1493 - DNA, 594 bp, Corynebacterium glutamicum
  CDS (101)..(571): RXN03138
agaatgttccagtcttggcatccaaccagccgattccgctggcccacactggggcgttggcgaggtctttggcggtgtacaagttgaggactaccttgacttggatattgttccgaaggatgtcgctgaaagcttcgccgtaggtgaggtcgtttttcttcgcgtgttgggtgacggcgtcgttgatgatgtgcccgtccacagcatcgacggaggctccgatttcggcggttccgtctggggagaaggtcactccgaaagagctgtcgtcttgggtaccgcgcgaaccggtggctcttgcgtcgtcaagcaaatctcttatttcttttatcttgcgtcctatggacgccgggcttggcagaatctggttggggctggtggcggtgaggtattcggtgaggattgcgtcggcgccggcgaggttgtcggggttgatgccggcgagttcgttgctaatggtgatcagtcgggagaggtcgaggtggtacagcttttgttgcagggctttgagttcgggcaagtcggcgagcgtggcaaacgcgatggatatgcgggagacctgcgcttttgttagacctgtgacgatggcgaggc

SEQ ID NO: 1494 - protein, 157 aa, Corynebacterium glutamicum
LDIVPKDVAESFAVGEVVFLRVLGDGVVDDVPVHSIDGGSDFGGSVWGEGHSERAVVLGTARTGGSCVVKQISYFFYLASYGRRAWQNLVGAGGGEVFGEDCVGAGEVVGVDAGEFVANGDQSGEVEVVQLLLQGFEFGQVGERGKRDGYAGDLRFC

SEQ ID NO: 1495 - DNA, 372 bp, Corynebacterium glutamicum
  CDS (101)..(349): RXN03140
ctcaagcgatcggtggaacatccactaacggggttaccaaaaatccttcgcggacactcccgaaggaacacttcttgcgagaaggaaaggaagaagcactgtgaagggcattcatcaggaaattagccgtatcgagcgtagccacgattatctgtggagcgtccgagaagacctgcatgcacgattcgacaaccaactgaaggcacactttgtagacagtgtcctggatagcattgcagaaggatatgaaggccgaatcaaccgattccgcaaaatcttcattgaaatgaaagcggttgaagagctgcgcaccatcgccgccacccgcccaagccacctcttggctgcataagacacttaaaagttaaataa

SEQ ID NO: 1496 - protein, 83 aa, Corynebacterium glutamicum
VKGIHQEISRIERSHDYLWSVREDLHARFDNQLKAHFVDSVLDSIAEGYEGRINRFRKIFIEMKAVEELRTIAATRPSHLLAA

SEQ ID NO: 1497 - DNA, 453 bp, Corynebacterium glutamicum
  CDS (101)..(430): RXN03141
ggccctgctgcttcatgcggtgagctgcgcgaccgaaagcgatctgtgaggaagcggtgaaatctgggtttcggtccagcttgaggatgtattccacggtgtggttgaagccaccggtgtcgccggtggtaatcacgtggccaccgtgtggcatgccggtgtgctcggagtcgaaggttgcttcgtcgatgaagttgacttcgacttcgtagccaacgaagtaatcaggcatggtgcggatgtcgttttcgatgcgctcgtgatcggccgcgtcggcaaccacgaagcattggcgcttgtgggtttgctttccggtaaggtcgccggcttcgccgcggcgggccttttccagggcgtcttcggatgggagggtgtactggactgccttttgaacgccagggatgcgtcgcaaagcatcggagtggccctgtgacaaacctgggccccagaagg

SEQ ID NO: 1498 - protein, 110 aa, Corynebacterium glutamicum
VVEATGVAGGNHVATVWHAGVLGVEGCFVDEVDFDFVANEVIRHGADVVFDALVIGRVGNHEALALVGLLSGKVAGFAAAGLFQGVFGWEGVLDCLLNARDASQSIGVAL

SEQ ID NO: 1499 - DNA, 594 bp, Corynebacterium glutamicum
  CDS (101)..(571): RXN03146
taacgtgggggttttaagcttgcgtagacatatcgtttttcgatagatttacatcttgaaacgatacgcccatccacggcgcatgtctgaaaggttccccatgaatccccgcatcctcatgctgcttcgcatcattttcggcgcggccttcctcgcactgttggtgctgcaagtcctgctcgccatcaaaatcgtgcgcgatggcctcaactccggcgagctctcccccatcccgctcaccattctcgcgagcttcgtgatcatcggtttcgggctcgtgcagttcatcatcgtctgtctgttcgcgctactgcgtctcgtggaagacgatgaaatcttcgacgcccactcgctcgcctgggttgatcgaattgccatcaccatcgcagccggcgccgttttactcctcccaatggcctacatcgtcgcagaagtcgacgacgcccccggagccatcgtcttcggtctcatcctcgcgatgctcatcacgggcgtatccctgctggtaaaaatcatgcgcgcactcctggcccgcgccatcggattctccacggaactggaatcggtgatctaaatggccatcatcgtcgacat

SEQ ID NO: 1500 - protein, 157 aa, Corynebacterium glutamicum
MNPRILMLLRIIFGAAFLALLVLQVLLAIKIVRDGLNSGELSPIPLTILASFVIIGFGLVQFIIVCLFALLRLVEDDEIFDAHSLAWVDRIAITIAAGAVLLLPMAYIVAEVDDAPGAIVFGLILAMLITGVSLLVKIMRALLARAIGFSTELESVI

SEQ ID NO: 1501 - DNA, 375 bp, Corynebacterium glutamicum
  CDS (101)..(352): RXN03147
ccctgatcccgaggacgatgaccgccaaagcgatggcgcctccaatcaggatgtactgcagtgggattgggcgggcgtcatcgatggcatcgatgcagttttggaaatcctctttaagagcggtttgggattcgttgtaatcatcggtgcggtcggcgaatacttcggcgcggatttctgcggtgcgggtgccggtggtggcggcttgttgaagttggctgagtacatcgctggctggatcgctggagaatccgctgatgatgtctttggcttcgtcgtatgtgtactccgttttgaaactttcctcggcgttggggtctgccagcgtgggatcgtctgggaggagcatggctaggccttcgccggattcgatgg

SEQ ID NO: 1502 - protein, 84 aa, Corynebacterium glutamicum
LEILFKSGLGFVVIIGAVGEYFGADFCGAGAGGGGLLKLAEYIAGWIAGESADDVFGFVVCVLRFETFLGVGVCQRGIVWEEHG

SEQ ID NO: 1503 - DNA, 390 bp, Corynebacterium glutamicum
  CDS (101)..(367): RXN03149
gctttactagaaccagtgatcggtaaactaccttttagttcggctattagcagtacaatctctgtggcgctgggatttattttagttaccgtatatcgatgtggttattggcgaactgcttcctaagagctatagtatcgtcaatacggagaaggtcgtcttgttcgtagttaaaccacttcattatttttataaagtaatgtttccttttatttgggtattgaatcattcagctgcagggctagggaagctattaggtgtgcgtctcgtatctgaaggagaagagacattgtctcaagaagagctgacattagtcgcattgaattcttatgaaaaaggagagttgccaaagaagaatatcattatttgaaaacgtgtttgaatttgatg

SEQ ID NO: 1504 - protein, 89 aa, Corynebacterium glutamicum
VVIGELLPKSYSIVNTEKVVLFVVKPLHYFYKVMFPFIWVLNHSAAGLGKLLGVRLVSEGEETLSQEELTLVALNSYEKGELPKKNIII

SEQ ID NO: 1505 - DNA, 396 bp, Corynebacterium glutamicum
  CDS (101)..(373): RXN03152
gcaaaatatcagctttgacctgcacatatagttgcacaatggtgaaagtgcacataaagtaactttcgtattcgaatatttaaacctaaggggtttagcaatgaagctattttctcgtactcccctcgtcgcactcggcacagctgctgcaatggcagcaacctccatctccgttcctgcacaggctgaagaagtcgcaccagcacaggttgtgtacgtggctgacaccgtagaagaagaaacgggtagctccaacggatcttctgacattgactctgacaccattttggattacgtcgtcgttattactggcatcgttggcgtcctcagcgctggtttgaccttcgctactgctttccagcgttcattgcagtaaatttcagcgttaatcaccaa

SEQ ID NO: 1506 - protein, 91 aa, Corynebacterium glutamicum
MKLFSRTPLVALGTAAAMAATSISVPAQAEEVAPAQVVYVADTVEEETGSSNGSSDIDSDTILDYVVVITGIVGVLSAGLTFATAFQRSLQ

SEQ ID NO: 1507 - DNA, 687 bp, Corynebacterium glutamicum
  CDS (101)..(664): RXN03153
taatttgaattttagggaacctaccccgagcttttgcagtctaacgcttatgagtgccttttcacggccctcgttacgactacaaagatcggggtattttatgcgacgaatctggctgctcgtatgcggcatcgcattgactgtcgccggctgcacgagtggatccaccactcccacaaccgtcacggtaaccgcaacgccaacgtcggaggaggctgcatccacggagccgaccaacgacatacttgccagccaatttcatccgtgtgaagtactcacgcaggaacagttcgaagaagtcggattgggagtcttgattgttgaagacgcttacctcggctcgacaggtttaggttgcagtttcgggaaagcagacagagaggatttttcaggtacgtggctcatttcaactgaccaagcaaaccgacaatttgttgaaaaccaagatctagagacattggattggggatccaatgacaatccagatctgtatgtgcatcaaatgtccgagacgggtcgtcaatgtgaggcagcagttgactatgactggggccggcttacggttgactatctcgaattaggtgagggctgggagccagaaattttgtgctctgatgctgttgaaattttagaaaatctcatcaaggaactaaggggaattccatgacattgaaaattgatccctcg

SEQ ID NO: 1508 - protein, 188 aa, Corynebacterium glutamicum
MRRIWLLVCGIALTVAGCTSGSTTPTTVTVTATPTSEEAASTEPTNDILASQFHPCEVLTQEQFEEVGLGVLIVEDAYLGSTGLGCSFGKADREDFSGTWLISTDQANRQFVENQDLETLDWGSNDNPDLYVHQMSETGRQCEAAVDYDWGRLTVDYLELGEGWEPEILCSDAVEILENLIKELRGIP

SEQ ID NO: 1509 - DNA, 1035 bp, Corynebacterium glutamicum
  CDS (101)..(1012): RXN03154
aaagtgccctctcctaaatcgtttctaagggctcgtcagaccccagttgatacaaacatacattctgaaaattcagtcgcttaaatgggcgcagcgggaaatgctgaaaactacattaatcaccgataccctagggcacgtgacctctactgaacccaccaccacagcccatgttccactacctgatggatcttccactccagtccaaatttgggcgtcagataacaaagactcccaactggtgatgctgtggccaggtttcggcatgggtggctattactatcgtccgcttgcggcagcgctaaataaagctggattccatgtggcgattggtgaacttcgtggtcaggggcaaagttccgcgaaggcttctcggaaaagtcagtggggataccatgatctcgcatcggtagattttccgctgcagattgccgctgcgaaaaaggcgcttgacctggaggaaggccatcccatgaggtttttgtcgcattcgatgggtgggcagatttcttgtcttttcgcagcgaggccggaggctgagaaatataatcttcgggcgattttcggggtgggtgcagggtcgccgtttaggcctacgtttagtccgaaaatggggaagcgtttgggattgggtgcggtgctgcttggtgggattggtggccacattgtgggattttggcccggcaaagttttaggaaaagacctggtgggttatggccgacaatcgggaactcacatgagggaatggcgtcgattccataagcacaattctttggacgatctcaccgcgcaggacatcaactatgtggaggtgatgaagaaggtgagcattcctattacttttagtcgttgtcctgatgatgaggactgcccgcaggcatcgattgatgggttggcgagttttgttcccgcagcgcagatcaaaatgatagaaattccagaagccctgggacataaccggtgggctcgggaacctgaatcaacagtgaaactcttcctggaacaagctctttagtgaccgatggagcggaggta

SEQ ID NO: 1510 - protein, 304 aa, Corynebacterium glutamicum
MLKTTLITDTLGHVTSTEPTTTAHVPLPDGSSTPVQIWASDNKDSQLVMLWPGFGMGGYYYRPLAAALNKAGFHVAIGELRGQGQSSAKASRKSQWGYHDLASVDFPLQIAAAKKALDLEEGHPMRFLSHSMGGQISCLFAARPEAEKYNLRAIFGVGAGSPFRPTFSPKMGKRLGLGAVLLGGIGGHIVGFWPGKVLGKDLVGYGRQSGTHMREWRRFHKHNSLDDLTAQDINYVEVMKKVSIPITFSRCPDDEDCPQASIDGLASFVPAAQIKMIEIPEALGHNRWAREPESTVKLFLEQAL

SEQ ID NO: 1511 - DNA, 303 bp, Corynebacterium glutamicum
  CDS (101)..(280): RXN03156
gtatcgacctcgatgatcgcgttgctgcagagatgaccattttaggtcgccctgtgcctaaagaaggataaccaccacaccagaaaagaagtacctcattatggctcgaaccacacctccaccagctgatgtactcgacatcatcatttccaccgtgaagcagaccatcggcattgatcttgctgaactgattcagggccgtgcactcggccaggctcaaggtgaggcacaaggcaaagctagtgcagcagcccttgagcaggcacctcataatgagcagtaaataacacacaccacatgtgc

SEQ ID NO: 1512 - protein, 60 aa, Corynebacterium glutamicum
MARTTPPPADVLDIIISTVKQTIGIDLAELIQGRALGQAQGEAQGKASAAALEQAPHNEQ

SEQ ID NO: 1513 - DNA, 182 bp, Corynebacterium glutamicum
  CDS (1)..(159): FRXA00176
cagctgatgtactcgacatcatcatttaccaccgtgaagcagaccatcggcattgatcttgctgaactgattcagggccgtgcactcggccaggctcaaggtgaggcacaaggcaaagctagtgcagcagcccttgagcaggcacctcataatgagcagtaaataacacacaccacatgtgc

SEQ ID NO: 1514 - protein, 53 aa, Corynebacterium glutamicum
QLMYSTSSFTTVKQTIGIDLAELIQGRALGQAQGEAQGKASAAALEQAPHNEQ

SEQ ID NO: 1515 - DNA, 519 bp, Corynebacterium glutamicum
  CDS (101)..(496): RXN03162
ggtcaatcagttcctgccactgctctggcttgtcgtaggtgtacttcgcgccggagaacagggttgcggagaagttgtcgccgccttctgctggcttcttgtgcacgacgaacactgggtgtggtccgacgagaaggatgcggatttcgccttcgacgatgcgtggcatgaaacgcatatcaacgagcatgccgttgtcgccgatgatgtactggtcacagaaatccatgaactcgccgagcttgcggacttcagtgtggttgtcgactgcttcggtgcacttgatttcagtgtccaatggcagtgcggtgcctggctcgatggatgcagccagttccttgtctaccaactggacgcgccaaatgccggagccggtggagccacggttttgcttgagcacgcgctcaccgaaggacagggaggttgggaaaaccttgtggaaggtctccacgtcgtagtacgcctcggtgtcggatggcaccaggtcggtttgggatagcttgaccagcgcatctttcg

SEQ ID NO: 1516 - protein, 132 aa, Corynebacterium glutamicum
VHDEHWVWSDEKDADFAFDDAWHETHINEHAVVADDVLVTEIHELAELADFSVVVDCFGALDFSVQWQCGAWLDGCSQFLVYQLDAPNAGAGGATVLLEHALTEGQGGWENLVEGLHVVVRLGVGWHQVGLG

SEQ ID NO: 1517 - DNA, 730 bp, Corynebacterium glutamicum
  CDS (101)..(730): RXN03167
gccgcgactgcgggtgcttttgcgctgttgcgtaaaaaatagtttttattaagggcattccctgattcccaggtggtgccacattgtttatggtggagatatgaacacgaacttgccgaacctatacaccgcatttgaccttgatcgaagtgaatcctccgaagctttaggtgtttccctttctgcccgcgatcttcgcttagaacaaatgggaattgcccaggacgatcctcgacgtgcccaaaccgtccaagctttcgcagtgcttgcagacccagcaaaacgcgccacctacgatgctcaattagaagctggagttccactcacctgggcgcagattcagcatttaggaaacttcggcaccttgccttccacccctactgcgcagccgtttgcggcacctcagccggagccgtcgccggaaccgcaacagcagtggaatagcggacaaaactatgcgtatggcaatccgaccatggattaccaaactcagcagagctacaacccgatgcaggaccaaacccaagcgtcgatgtatgcgcaacctttcgcgaacacccctgcaccgatgtacaacagcaatcaggtttttaacaggcctactgcgggtacgcgtttgtggatggcgatcctcgacagtatttttgccggcatcgctggtggaattgtctccggtattttcggctttggatctgaattcctcaccagtgtcatcatgattttggtgctg

SEQ ID NO: 1518 - protein, 210 aa, Corynebacterium glutamicum
MNTNLPNLYTAFDLDRSESSEALGVSLSARDLRLEQMGIAQDDPRRAQTVQAFAVLADPAKRATYDAQLEAGVPLTWAQIQHLGNFGTLPSTPTAQPFAAPQPEPSPEPQQQWNSGQNYAYGNPTMDYQTQQSYNPMQDQTQASMYAQPFANTPAPMYNSNQVFNRPTAGTRLWMAILDSIFAGIAGGIVSGIFGFGSEFLTSVIMILVL

SEQ ID NO: 1519 - DNA, 736 bp, Corynebacterium glutamicum
  CDS (101)..(736): FRXA02862
gccgcgactgcgggtgcttttgcgctgttgcgtaaaaaatagtttttattaagggcattccctgattcccaggtggtgccacattgtttatggtggagatatgaacacgaacttgccgaacctatacaccgcatttgaccttgatcgaagtgaatcctccgaagctttaggtgtttccctttctgcccgcgatcttcgcttagaacaaatgggaattgcccaggacgatcctcgacgtgcccaaaccgtccaagctttcgcagtgcttgcagacccagcaaaacgcgccacctacgatgctcaattagaagctggagttccactcacctgggcgcagattcagcatttaggaaacttcggcaccttgccttccacccctactgcgcagccgtttgcggcacctcagccggagccgtcgccggaaccgcaacagcagtggaatagcggacaaaactatgcgtatggcaatccgaccatggattaccaaactcagcagagctacaacccgatgcaggaccaaacccaagcgtcgatgtatgcgcaacctttcgcgaacacccctgcaccgatgtacaacagcaatcaggtttttaacaggcctactgcgggtacgcgtttgtggatggcgatcctcgacagtatttttgccggcatcgctggtggaattgtctccggtattttcggctttggatctgaattcctcaccagtgtcatcatgattttggtgctgatcgtc

SEQ ID NO: 1520 - protein, 212 aa, Corynebacterium glutamicum
MNTNLPNLYTAFDLDRSESSEALGVSLSARDLRLEQMGIAQDDPRRAQTVQAFAVLADPAKRATYDAQLEAGVPLTWAQIQHLGNFGTLPSTPTAQPFAAPQPEPSPEPQQQWNSGQNYAYGNPTMDYQTQQSYNPMQDQTQASMYAQPFANTPAPMYNSNQVFNRPTAGTRLWMAILDSIFAGIAGGIVSGIFGFGSEFLTSVIMILVLIV

SEQ ID NO: 1521 - DNA, 372 bp, Corynebacterium glutamicum
  CDS (101)..(349): RXN03170
gttaaatcattgccgcccagaagaagaccgcgcgggcgaatttgggcttggagggaaccaaacggccacttttccagtccaacaaagtatgaggattaatttgccccacgccaaagagctcgcccacgagctgtgtttgttgcccacccctgctgtgcccgcgcttcccactgattctggcgcgcagtttgatatccaccaggcactatccgcctcccttgccacctatgcccgcaacctcaccttgctgtcccacaccgccgagaatttaggaaaccgcgcgctgacgggcctcgctgaaatcgaagacaccgacgaccaactcgcacacgcattggagcgcctgacatgatcggtctgatcagcgccctt

SEQ ID NO: 1522 - protein, 83 aa, Corynebacterium glutamicum
LPHAKELAHELCLLPTPAVPALPTDSGAQFDIHQALSASLATYARNLTLLSHTAENLGNRALTGLAEIEDTDDQLAHALERLT

SEQ ID NO: 1523 - DNA, 372 bp, Corynebacterium glutamicum; identical to SEQ ID NO: 1521
  CDS (101)..(349): FRXA02856

SEQ ID NO: 1524 - protein, 83 aa, Corynebacterium glutamicum; identical to SEQ ID NO: 1522

SEQ ID NO: 1525 - DNA, 1049 bp, Corynebacterium glutamicum
  CDS (1)..(1026): RXN03172
ccagagtggaagaaattcaactccggcgacgcagcccgcgttgtcccagacgccaacgcagagctcgacatcatcggcgcaccagcacttcttgccgatcgcccctcctacgcaaacgtcaaaaccctctcccgcatcttcgctgtcatgcgcagcctcggccacgtcaccgctgcctccccagtcaccgtgttcttctcctcccactccgtgctcagcaacgttgaccgcggatccgagcactactccggacccaacggcctgggcgaatggacctccgttggtcgcgcagtagccaccaactggaacggcgttgtcgacgccctcgacgaagccatcaccgtcaaggaagtaaacagcctctttaccgaagacgccgcaacccgcattcaagaagcacaagcagctgttcaggcagctcgcgaggctgaagagcaaatcgccaaggaagaagccgaaaaggtcgacccttacgacaactccccatgggctgcagcaggcatcgaccccatcaaggtctccatcgacggacgcaccatctacaccctgcgcacctacctcggcggacagccagtattcctcggaaaattcggcgaaatctccaccttcaacagccaaaaatccctcctgcgctggctcgtcgaacacgatgaccacgacctcgcccgcgcctccacctggagcgacctcatgctcggcatcaacgccggtgaaaccgaactcctcgtccacagcgacaacgtctactccttcaacggcctggtcaaagacatcaacacctccgtcgacgccgtagacacccaacaaatggcccgcgcctacgaactcatggcagacaccgccgactgggccgacgacgactccatgaattcctacttcctggccaacccacgcatgcaggactacatctcctacatgctcggcggcagcgacacctccggatatgtccctcacgcaccattcaacgaccactctgagagctggcgcgagctggaggagatgctgatcaagcgattcagcaagttctaggtcgcctatttggggttcgt

SEQ ID NO: 1526 - protein, 342 aa, Corynebacterium glutamicum
PEWKKFNSGDAARVVPDANAELDIIGAPALLADRPSYANVKTLSRIFAVMRSLGHVTAASPVTVFFSSHSVLSNVDRGSEHYSGPNGLGEWTSVGRAVATNWNGVVDALDEAITVKEVNSLFTEDAATRIQEAQAAVQAAREAEEQIAKEEAEKVDPYDNSPWAAAGIDPIKVSIDGRTIYTLRTYLGGQPVFLGKFGEISTFNSQKSLLRWLVEHDDHDLARASTWSDLMLGINAGETELLVHSDNVYSFNGLVKDINTSVDAVDTQQMARAYELMADTADWADDDSMNSYFLANPRMQDYISYMLGGSDTSGYVPHAPFNDHSESWRELEEMLIKRFSKF

SEQ ID NO: 1527 - DNA, 1049 bp, Corynebacterium glutamicum
  CDS (1)..(1026): FRXA02858
ccagagtggaagaaattcaactccggcgacgcagcccgcgttgtcccagacgccaacgcagagctcgacatcatcggcgcaccagcacttcttgccgatcgcccctcctacgcaaacgtcaaaaccctctcccgcatcttcgctgtcatgcgcagcctcggccacgtcaccgctgcctccccagtcaccgtgttcttctcctcccactccgtgctcagcaacgttgaccgcggatccgagcactactccggacccaacggcctgggcgaatggacctccgttggtcgcgcagtagccaccaactggaacggcgttgtcgacgccctcgacgaagccatcaccgtcaaggaagtaaacagcctctttaccgaagacgccgcaacccgcattcaagaagcacaagcagctgttcaggcagctcgcgaggctgaagagcaaatcgccaaggaagaagccgaaaaggtcgacccttacgacaactccccatgggctgcagcaggcatcgaccccatcaaggtctccatcgacggacgcaccatctacaccctgcgcacctacctcggcggacagccagtattcctcggaaaattcggcgaaatcttcaccttcaacagccaaaaatccctcctgcgctggctcgtcgaacacgatgaccacgacctcgcccgcgcctccacctggagcgacctcatgctcggcatcaacgccggtgaaaccgaactcctcgtccacagcgacaacgtctactccttcaacggcctggtcaaagacatcaacacctccgtcgacgccgtagacacccaacaaatggcccgcgcctacgaactcatggcagacaccgccgactgggccgacgacgactccatgaattcctacttcctggccaacccacgcatgcaggactacatctcctacatgctcggcggcagcgacacctccggatatgtccctcacgcaccattcaacgaccactctgagagctggcgcgagctggaggagatgctgatcaagcgattcagcaagttctaggtcgcctatttggggttcgt

SEQ ID NO: 1528 - protein, 342 aa, Corynebacterium glutamicum
PEWKKFNSGDAARVVPDANAELDIIGAPALLADRPSYANVKTLSRIFAVMRSLGHVTAASPVTVFFSSHSVLSNVDRGSEHYSGPNGLGEWTSVGRAVATNWNGVVDALDEAITVKEVNSLFTEDAATRIQEAQAAVQAAREAEEQIAKEEAEKVDPYDNSPWAAAGIDPIKVSIDGRTIYTLRTYLGGQPVFLGKFGEIFTFNSQKSLLRWLVEHDDHDLARASTWSDLMLGINAGETELLVHSDNVYSFNGLVKDINTSVDAVDTQQMARAYELMADTADWADDDSMNSYFLANPRMQDYISYMLGGSDTSGYVPHAPFNDHSESWRELEEMLIKRFSKF

SEQ ID NO: 1529 - DNA, 1121 bp, Corynebacterium glutamicum
  CDS (1)..(1098): RXN03173
ctcaaccgcgacacccatcacctgtgggtcgtcttaaccaccgactccgacgacttcgacgcagactcctttaccaccgaagtcatccggatcaccggctactcccgccacgaagtcaacaacggccttaacgccatggccgcgatgaccaacctcccacacctgcgcgccatccaagaacgctactacttcctgagcatccgctacctcgcctccatcatgatcgccgtggccaaagcagaccccaccctgtgggaagaactcgacctgcgcatcaccgacgccttaacaccagtcaccgcaggggaagtcatgatccaatcctccaccctgtccaaacgcatcgccgcctggatcaaagaactcgaccccgaacccacaccagagcccacaccgaaagaggactatgttcacgtccacaccactgatgaggcgacctatgtccgcatcaaaatcagcggccccaaccgcctgatcctcaatgacatcatcacccaactcaaagacacagacaccgaggacagcctgcctgaagcgctcatggcgttcctgacagagaaaatccagttaaagatcaccaaatacctcttcaccccacataagcaccctgagcaggtgtggtcaccggactacggtgacattgatcccgaagcctatgccaacgccaccctcgtgtgcgccaaggacttagatgagctcgctggagccacggagaagagctacaccccgagtgagaagatgaaagccctgatcagagctcgggatgggcattgccgcttcccagggtgttgcgttccggcgagtaagtgccaggtcgatcacattatcccgtgggcggagggcggcccgacagcggcgtggaacctgcagttgttgtgccagcggcatcacaatatgaaaaccgatggtcgctttactgctgatgctaatggattggcggagattagatggattgggccgatggatgtaccagcggtgaccaggccgacgggtccgttggtgaaagcgatgccgcgggggatttggggtcaggtgttgagggatcggatccaggctaggtttgagcggatccgcgaccgcgccctcaacaaagaagactagaagcgcacaggtttttgcat

SEQ ID NO: 1530 - protein, 366 aa, Corynebacterium glutamicum
LNRDTHHLWVVLTTDSDDFDADSFTTEVIRITGYSRHEVNNGLNAMAAMTNLPHLRAIQERYYFLSIRYLASIMIAVAKADPTLWEELDLRITDALTPVTAGEVMIQSSTLSKRIAAWIKELDPEPTPEPTPKEDYVHVHTTDEATYVRIKISGPNRLILNDIITQLKDTDTEDSLPEALMAFLTEKIQLKITKYLFTPHKHPEQVWSPDYGDIDPEAYANATLVCAKDLDELAGATEKSYTPSEKMKALIRARDGHCRFPGCCVPASKCQVDHIIPWAEGGPTAAWNLQLLCQRHHNMKTDGRFTADANGLAEIRWIGPMDVPAVTRPTGPLVKAMPRGIWGQVLRDRIQARFERIRDRALNKED

SEQ ID NO: 1531 - DNA, 503 bp, Corynebacterium glutamicum
  CDS (1)..(480): FRXA02874
  modified_base (347): a, c, t, or g
  modified_base (356): a, c, t, or g
accgaactcaaccgcgacacccatcacctgtgggtcgtcttaaccaccgactccgacgacttcgacgcagactcctttaccaccgaagtcatccggatcaccggctactcccgccacgaagtcaacaacggccttaacgccatggccgcgatgaccaacctcccacacctgcgcgccatccaagaacgctactacttcctgagcatccgctacctcgcctccatcatgatcgccgtggccaaagcagaccccaccctgtgggaagaactcgacctgcgcatcaccgacgccttaacaccagtcaccgcaggggaagtcatgatccaatcctccaccctgtccaaacngcatcgccngcctggatcaaagaactcgaccccgaacccacaccagagcccacaccgaaagaggactatgttcacgtccacaccactgatgaggcgacctatgtccgcatcaaaatcagcggccccaaccgcctgatcctcaatgacatcatcacc

SEQ ID NO: 1532 - protein, 160 aa, Corynebacterium glutamicum
  MOD_RES (116): Leu, Pro, Gln, or Arg
  MOD_RES (119): Leu, Pro, Gln, or Arg
TELNRDTHHLWVVLTTDSDDFDADSFTTEVIRITGYSRHEVNNGLNAMAAMTNLPHLRAIQERYYFLSIRYLASIMIAVAKADPTLWEELDLRITDALTPVTAGEVMIQSSTLSKXHRXPGSKNSTPNPHQSPHRKRTMFTSTPLMRRPMSASKSAAPTA

SEQ ID NO: 1533 - DNA, 556 bp, Corynebacterium glutamicum
  CDS (101)..(556): RXN03174
gcgatgctcgaacgcgcagaacgctcctgggtagacaaagccgctgcatacgatttgcgctggtcagatcactcaccactgaacgtgatctactcctaaaatgctgctgacaattctatgggccatcggcatcaccgccgaaggcatgacaggcgcgctggccgcaggccgacaaaaaatggatctcttcggagtatccgtcatcgcatgcgttaccgcgatcggcggcggatccatccgcgacatgctgctgggacattacccgctggtgtgggtggaaaagccactgtatctactgctgatcattggcgcagccattttgacagtgtccatttccttcctgatggagcacttccgtgtgttgttcctcgtgctcgacgccgtgggtctttctgcattcgctgtgatcggcacacaaatcgcactggaaatgggctacggattcatcatcgcagtagtggcatcagtgctcacaggtgtattcggcggcgtcatgcgtgaccttttgtgtgaccgcatcccactggtatttcaaaaagagctctacgcatcaatc

SEQ ID NO: 1534 - protein, 152 aa, Corynebacterium glutamicum
MLLTILWAIGITAEGMTGALAAGRQKMDLFGVSVIACVTAIGGGSIRDMLLGHYPLVWVEKPLYLLLIIGAAILTVSISFLMEHFRVLFLVLDAVGLSAFAVIGTQIALEMGYGFIIAVVASVLTGVFGGVMRDLLCDRIPLVFQKELYASI

SEQ ID NO: 1535 - DNA, 562 bp, Corynebacterium glutamicum
  CDS (101)..(562): FRXA02884
gcgatgctcgaacgcgcagaacgctcctgggtagacaaagccgctgcatacgatttgcgctggtcagatcactcaccactgaacgtgatctactcctaaaatgctgctgacaattctatgggccatcggcatcaccgccgaaggcatgacaggcgcgctggccgcaggccgacaaaaaatggatctcttcggagtatccgtcatcgcatgcgttaccgcgatcggcggcggatccatccgcgacatgctgctgggacattacccgctggtgtgggtggaaaagccactgtatctactgctgatcattggcgcagccattttgacagtgtccatttccttcctgatggagcacttccgtgtgttgttcctcgtgctcgacgccgtgggtctttctgcattcgctgtgatcggcacacaaatcgcactggaaatgggctacggattcatcatcgcagtagtggcatcagtgctcacaggtgtattcggcggcgtcatgcgtgaccttttgtgtgaccgcatcccactggtatttcaaaaagagctctacgcatcaatcgcattc

SEQ ID NO: 1536 - protein, 154 aa, Corynebacterium glutamicum
MLLTILWAIGITAEGMTGALAAGRQKMDLFGVSVIACVTAIGGGSIRDMLLGHYPLVWVEKPLYLLLIIGAAILTVSISFLMEHFRVLFLVLDAVGLSAFAVIGTQIALEMGYGFIIAVVASVLTGVFGGVMRDLLCDRIPLVFQKELYASIAF

SEQ ID NO: 1537 - DNA, 781 bp, Corynebacterium glutamicum
  CDS (93)..(758): RXN03177
ctgcccgatttatgttttccgacggcaccatctgcaaagaacgagtgtgaccggtagctttatgggctgaacaattctaaggagaattatccgtgaaaaagaagcttatgttgcctttgattgttgcagctttggggttaagtgcctgcagctccgaacctgcagcagccccactcgaagcagagccattacataacctgctcattgatggttcagagtccggcttggacaatgccactgaaggaaacgacacctcattaagtggccaacccatcaatcttacagtggtcaacggtgccttagatatcgatggctcctgcggaaaagccctccaagctgtagaggacgtcaatctggacagcgtagctagcgcatccagggcactggcatccggcgacaaacaagtaggcatcgccatgtactcaaccgccgaagacaacgacatctcaccaatggacctctacgcagacatcgcgaatgcttgcgaagaccccgtcgtcgattcttccgacaccacctacaccttcggcaaactcgatgatgctcccgacggcgccgttggattcaccctcgacattgaagtcacccctgacaatcaaggctccaccgtgatgatgatccaagaattaggaaaccaccacatcatcgtcgcaggacttgaaaccaccccagaagaaaccgccactgtcttcgaagcacaacgcaccaaactcgaagaaggcttgcagcttaaacagaattggcagcttgggtgggtttaaatgcgcccaacctaagaaaa

SEQ ID NO: 1538 - protein, 222 aa, Corynebacterium glutamicum
VKKKLMLPLIVAALGLSACSSEPAAAPLEAEPLHNLLIDGSESGLDNATEGNDTSLSGQPINLTVVNGALDIDGSCGKALQAVEDVNLDSVASASRALASGDKQVGIAMYSTAEDNDISPMDLYADIANACEDPVVDSSDTTYTFGKLDDAPDGAVGFTLDIEVTPDNQGSTVMMIQELGNHHIIVAGLETTPEETATVFEAQRTKLEEGLQLKQNWQLGWV

SEQ ID NO: 1539 - DNA, 782 bp, Corynebacterium glutamicum
  CDS (94)..(759): FRXA02881
ctgcccgatttcatgttttccgacggcaccatctgcaaagaacgagtgtgaccggtagctttatgggctgaacaattctaaggagaattatccgtgaaaaagaagcttatgttgcctttgattgttgcagctttggggttaagtgcctgcagctccgaacctgcagcagccccactcgaagcagagccattacataacctgctcattgatggttcagagtccggcttggacaatgccactgaaggaaacgacacctcattaagtggccaacccatcaatcttacagtggtcaacggtgccttagatatcgatggctcctgcggaaaagccctccaagctgtagaggacgtcaatctggacagcgtagctagcgcatccagggcactggcatccggcgacaaacaagtaggcatcgccatgtactcaaccgccgaagacaacgacatctcaccaatggacctctacgcagacatcgcgaatgcttgcgaagaccccgtcgtcgattcttccgacaccacctacaccttcggcaaactcgatgatgctcccgacggcgccgttggattcaccctcgacattgaagtcacccctgacaatcaaggctccaccgtgatgatgatccaagaattaggaaaccaccacatcatcgtcgcaggacttgaaaccaccccagaagaaaccgccactgtcttcgaagcacaacgcaccaaactcgaagaaggcttgcagcttaaacagaattggcagcttgggtgggtttaaatgcgcccaacctaagaaaa

SEQ ID NO: 1540 - protein, 222 aa, Corynebacterium glutamicum; identical to SEQ ID NO: 1538

SEQ ID NO: 1541 - DNA, 373 bp, Corynebacterium glutamicum
  CDS (101)..(373): RXN03182
actcgacaccaccgtcaccaacttcatgatggtcatcgcactcttaggattcatcagctctgtatccgtagcccgcttccgcaagagggatggtgcctaaatgaccctgcaactattcaccgacatcgtgtctctggtgttcattctcagcggcgcattcttgtcattctccgcatccatcggcctcatacgattcaaagacaccatgtccagagtccacgccatgaccaaaccccaaacaaccggccttatcctcaccgttgtaggcgcaatcatccgcatcttaggccacgaacacttcgatcaatcacaacgcagtgacctcggagtccttgttctcctcgtactgtttgcactgctcaccagcccagtg

SEQ ID NO: 1542 - protein, 91 aa, Corynebacterium glutamicum
MTLQLFTDIVSLVFILSGAFLSFSASIGLIRFKDTMSRVHAMTKPQTTGLILTVVGAIIRILGHEHFDQSQRSDLGVLVLLVLFALLTSPV

SEQ ID NO: 1543 - DNA, 603 bp, Corynebacterium glutamicum
  CDS (87)..(584): RXN03184
gcacaacgtcgctggtcagtgccattagtcacgcaagaaatgggcgggtccggtggaagactggcctgctgtttggtgccgcgggcatggttggcgcgtttggcggtggcgttctcgggggctacattcctggcacgattttgatgatcgcgtttgcgctcatgatgatcgccacgtcgactgcgatgttgcgggggcgtaagcagaagaagggggcgtcgaaaagctctctttggcgcgtccttgttgatggcctggtggtcggcgcggtgaccgggcttgttggtgcgggcggcggctttttggtggtgccggcgctggcgctgctcggcgggctgtcgatgccggtggctgtgggcacgtcgttggtggtgatcacgatgaagtcgtttgcggggcttgccgggtatctgaccagcgtgcagctggattgggggctggtgctgatggtgactgcggccgccatcgtcggttcgcttgccggttcgcgccttgcggggcgcgtgcctgagactttgctccgcaaagggttcggggtgttcgtgctggtcatgggcgtgttcgtgctcggcttggagcttttataagcttttcgacgtctcc

SEQ ID NO: 1544 - protein, 166 aa, Corynebacterium glutamicum
MVGAFGGGVLGGYIPGTILMIAFALMMIATSTAMLRGRKQKKGASKSSLWRVLVDGLVVGAVTGLVGAGGGFLVVPALALLGGLSMPVAVGTSLVVITMKSFAGLAGYLTSVQLDWGLVLMVTAAAIVGSLAGSRLAGRVPETLLRKGFGVFVLVMGVFVLGLELL

SEQ ID NO: 1545 - DNA, 295 bp, Corynebacterium glutamicum
  CDS (84)..(272): RXN03185
  modified_base (57): a, c, t, or g
agcgcccaaccgttcagaccagcggtttctctgaggatgcaaagtccatgatgggtnaggtcactgagctgtccgaaaccaccatgaatgatcttgcagctgaaggtgaaaacgatccttaccgcatggttcagcagctgcgccgcaagctctctcgcttcgtcgagcagaagtggaagcgccagccggtcatcatgccaaccgtcattccgatgactgcggaaaccacgcacatcggtgacgatgaggttcgcgcttcacgcgagtccctgtaaaagcatttcgcttttcgacg

SEQ ID NO: 1546 - protein, 63 aa, Corynebacterium glutamicum
MNDLAAEGENDPYRMVQQLRRKLSRFVEQKWKRQPVIMPTVIPMTAETTHIGDDEVRASRESL

SEQ ID NO: 1547 - DNA, 864 bp, Corynebacterium glutamicum
  CDS (101)..(841): RXA00003
catccatttcgcacagaacatggtaatccttctctaggccccactcgaagccggcgatataagcgccaagaaggccacccttgccttcgcggtgcagcacgtgcaggtgagaatcctcagcagcgagcttgtctgcagcctctccggtgccatccggggcgtgaacctagatattgcagcaccgaagcccaagaagtcaggccgccgcacactcacaaaacccgaatgggatgccgtcattaagcatctgttaacgcgggataccgagccactgttaacccccaccaagcacaagaacatccgacaaagcaccaagaacatccatgcccgcattgtgcggctcactctcctccaagccgtttcagggctgagaattgccgaagccaatcaattgcagtggaagcacatcatcgacggtgacgatggcatgctcattaatgccagcgccgatattgtcaaggggcgaaaaggcaaggaaagagggcggtatatccctatcctgagggccgacgtagcggaatacctgcgtacacaccgcgaggacgacgagcatttcatcgtaggctcaccgacgacgaccgcgaggccctgggacgcgacgaacgcagatgacaaggtgcccgagctataccggcaaattgcagaagctacaggcgtgaagactcttcaagacctccgaagccactcctggcgtgcgacgctgcacggtgtgtacgcggacgtgatggacccagctacacgcgccgccattttcggccacaccgagcaggtagctgaggagtactacaacgaccgccaaaatattgaatcactcatgagacaagtcaagcgcgcctacgcgtaactacgcttaagactacgcgt

SEQ ID NO: 1548 - protein, 247 aa, Corynebacterium glutamicum
VQVRILSSELVCSLSGAIRGVNLDIAAPKPKKSGRRTLTKPEWDAVIKHLLTRDTEPLLTPTKHKNIRQSTKNIHARIVRLTLLQAVSGLRIAEANQLQWKHIIDGDDGMLINASADIVKGRKGKERGRYIPILRADVAEYLRTHREDDEHFIVGSPTTTARPWDATNADDKVPELYRQIAEATGVKTLQDLRSHSWRATLHGVYADVMDPATRAAIFGHTEQVAEEYYNDRQNIESLMRQVKRAYA

SEQ ID NO: 1549 - DNA, 615 bp, Corynebacterium glutamicum
  CDS (101)..(592): RXA00008
cattggcgtggtgatcgccggcattatcgcacaactcaccctgcgcttctacgtgaggaaataagactattgaactccttgccgtagacttagaaagactatggccaagaagaaaaagaaagtcgacgaaaacaactcagttctcgcgaccaatcgcaaggcccgccatgactaccacatcattgatacgtgggaggcgggcgtggtgctcttaggcaccgaaatcaaatcactgcgcgaaggtaaggtatccctcgtggattcctttgccaccattgataacggagaaatctggcttcagcatctccacatcccgcagtattccatgggctcctggacaaaccacacgcccaagcgcacccgcaaacttttgctgcaccgcaacgagattgattccctgatgggtaaagtccgcgacggcaaccgcacgttggttccgctcaagctttacctcaaaaacggtcgcgtcaaactcgaactcggactcgcacaaggtaagcaggattacgacaagcgccaagatatcaagcgtcgcaccgaagaacgcgaagtcacccgtgagctcggccgtcgcattaagggaatcaacgcgtaaatgagtattcacatcgcaaa

SEQ ID NO: 1550 - protein, 164 aa, Corynebacterium glutamicum
MAKKKKKVDENNSVLATNRKARHDYHIIDTWEAGVVLLGTEIKSLREGKVSLVDSFATIDNGEIWLQHLHIPQYSMGSWTNHTPKRTRKLLLHRNEIDSLMGKVRDGNRTLVPLKLYLKNGRVKLELGLAQGKQDYDKRQDIKRRTEEREVTRELGRRIKGINA

SEQ ID NO: 1551 - DNA, 432 bp, Corynebacterium glutamicum
  CDS (101)..(409): RXA00015
aagacgcacagaagctacacacatagctacatcgtcagcaccaaagccggaacaagaactacagcaaccgacgacactcaacgagcgcgacctccaagacatgattgatatgtgcaccactcctcgacaagagatcatgatccgcgagcaatttaaggagatcaacaacggtagggttgtacctcattacgatcagcttgaacagctcgcagagattttttcaactaaagactcaatcgacatggtcaacgagatactcaatcgcgatacggattttctcagtaatgaaggcacaatttttatggaatacattttcaacggtggattccatacggacaacggctatcaaccgttgtcctatgcatatgttgaacgaggcttagcgatccgccctccacgcatagtgctctagatatgacacaaatcggtatt

SEQ ID NO: 1552 - protein, 103 aa, Corynebacterium glutamicum
MIDMCTTPRQEIMIREQFKEINNGRVVPHYDQLEQLAEIFSTKDSIDMVNEILNRDTDFLSNEGTIFMEYIFNGGFHTDNGYQPLSYAYVERGLAIRPPRIVL

SEQ ID NO: 1553 - DNA, 1422 bp, Corynebacterium glutamicum
  CDS (101)..(1399): RXA00018
caacccgccccacaaacacatacaattaacttctatatttagtaaataaataactagtatttttaatgacttacaaatatcaagaaagaatctattccttatgtccgcattatctagaccgcacaagatcgccaccggcgttgctgtcgcaactcttaccctcaccttgtgtacctctgctgccggcgttgtccatgcagcgcaacaatccatcagcggtccagaatcctcctgtgcttttaatcaacagcgttgggatgacagcaaagttaagcttgacgacaccatcgctacggccaaaaactcattggtacaaacaggcgaactgcaccgcaacgaacaggatctacttactggctatcttttccagcaaccgcacagcagcaattaccttgcactcaacaacgcttatgccgatgccgtagcaatcaaagacagctttgtccgcccaacatgtgacggttctaaagagtccaagattgccagcgaacacgccgtgtctgaggttgtgggtgcagtgaatgtactcgcccgagcacaaaaagcgctgcagattaactccgacacctacgaacagcaacgtcgttgtgatgcccttcgtctagcaagccgagatgaatcagatgttcttatgcgcattgatcgcaccatgctgcagcttcgtcgcacactagctgacattgaccaggcgtccacagacattcgcgatattcgggctcaaacaacaagctttgaacgtgatcttgcccgcgagcaaaaagaggccgacgcagcagcacgtgctcaagctgtagacacttcgaccacaccaacatcaagcacagaagatcgtgtcaacgacattcttaaagagtcccgtaccgatcacagtggcgacagttacacgcgctcaacgacaacgagcgcacaaagcactgagccggattctgcaaccaacacctcatatctgtcacgtcgtctcgacagcctggaacgcagtgcgcagcatattgatctcaatacccagtgcgacaacctcgatgatcttcgtgaactcaccaacaatgacacgcgtgatcacaccggctccgtcatttccattgccgatcaactcacagacatcaccaatgaaatcaatgaattacgcgatagcacttttgccaccagagacagtgcccaacaagcacaggatcaggtaattgctcaacgtgaagaactgcaacgagcaaaggaagcacgactagaagaacagcgactcgccaaagaagcagaagagggcgctcgcaacgcagcaattcaggaacgtgacgcggccgaagcagcactgcgtgaagcacaagacctcctcagtcgcctcgatgacacaggcaacgcaaccagtgatgacacagcagcgctagtagacggtcttctcaataactaacaatcagcaacaccgctcac

SEQ ID NO: 1554 - protein, 433 aa, Corynebacterium glutamicum
MSALSRPHKIATGVAVATLTLTLCTSAAGVVHAAQQSISGPESSCAFNQQRWDDSKVKLDDTIATAKNSLVQTGELHRNEQDLLTGYLFQQPHSSNYLALNNAYADAVAIKDSFVRPTCDGSKESKIASEHAVSEVVGAVNVLARAQKALQINSDTYEQQRRCDALRLASRDESDVLMRIDRTMLQLRRTLADIDQASTDIRDIRAQTTSFERDLAREQKEADAAARAQAVDTSTTPTSSTEDRVNDILKESRTDHSGDSYTRSTTTSAQSTEPDSATNTSYLSRRLDSLERSAQHIDLNTQCDNLDDLRELTNNDTRDHTGSVISIADQLTDITNEINELRDSTFATRDSAQQAQDQVIAQREELQRAKEARLEEQRLAKEAEEGARNAAIQERDAAEAALREAQDLLSRLDDTGNATSDDTAALVDGLLNN

SEQ ID NO: 1555 - DNA, 903 bp, Corynebacterium glutamicum
  CDS (101)..(880): RXA00020
taggagaactacctttcttgctggtgttacctagctttaagtttgttagagtaattaatgaataactaagtaatgtaagtaaagggacttttaaataactatgactgtgaccaccgcacaacgaatcgctgacgaatttcaacgtggcattagtatcggcccgtgggatctgtgcgaagtaccagcaggcgatgactatttagagcacaccaccaaggtcaggcgacgccacagcacggctgtagagattcacactgactctttgatcatttgtgcgcctgaaggcagtacgtacagccacaaccgcactaaggctggtcttgcgtccacgggcacagtcactgtgccagtgaaggggctttctgagcctgtgaagcttagtctcaatcttcttgctgattatggaaactcctttgacactgtgcacgacgatctgtggcaacgagagctgcgtgagcagacgcgggggcagttactcacacttaatgcagtctccggtcttggggatgacagcgtggcgattatgggcacgccatggggcgatggtctcaccggggaggccaacaccattaaaggtcgtgagcattttgtcatgtgggctgcagggtgccgctttgaagacggttatggtcgtcacgcacttcgagaggatcgccatgtgcgacaccaggcacgtgcgggtgaggattccactgcacatcacggttggttgcttaaaggcacagtgttcgggaaagaactcaccggtgatgctgtgacggcagccatgacagtttttagtgatgtggtggtcactgtcgatgaggggcgtatccctggcatgaaatcaggacaaccgttttctatggcaacccgtttacgcgcatcatctgcgcctgtgtagagactttttcagaccttaac

SEQ ID NO: 1556 - protein, 260 aa, Corynebacterium glutamicum
MTVTTAQRIADEFQRGISIGPWDLCEVPAGDDYLEHTTKVRRRHSTAVEIHTDSLIICAPEGSTYSHNRTKAGLASTGTVTVPVKGLSEPVKLSLNLLADYGNSFDTVHDDLWQRELREQTRGQLLTLNAVSGLGDDSVAIMGTPWGDGLTGEANTIKGREHFVMWAAGCRFEDGYGRHALREDRHVRHQARAGEDSTAHHGWLLKGTVFGKELTGDAVTAAMTVFSDVVVTVDEGRIPGMKSGQPFSMATRLRASSAPV

SEQ ID NO: 1557 - DNA, 1896 bp, Corynebacterium glutamicum
  CDS (101)..(1873): RXA00021
aaaagcaactcacttcgtgcttttttcaccgaccccggctgtgtggatgccacccacttacaccgcacaatcgaaaataaaagtaaaggatgttcaccttatgtctgacaccacagacagccacgacccagcaacctcccctacagtcgattcagccgcatccggtacttctgaccccaaccagcaacccaagaagaaattcaccatcattaagcaggtgaacatgattgcgcgtactgccattgatgactgcattaatcgactaggcccagatgttgtcaccatgtccagcgaagacattgctgatcaagtggtcaactccattaacgttgctattgccagagaaaacacacgtgcccaagatgccaatgctgcggtgcgttacacacctatctttaagctcgatttctcccatgtcgctgtccttatgcgcagactgcatgtgattatcaacatcgcgccatcgcataactctgatcctgacagcgatatgttggctatttacgaccccaacccacgcagcgagcattacgggatctatcgcacctcagaggctgaaatacgccgcgtagcccgtgaatactgccctgacctcacctcagcgcagtttagagaactgcagatggcactctcagatgctgcacctcgtaaagtccgccacaagcagcgtgacttgattcccgtgaaaaacggcatctttaattactcgactaaacaactagaaccgttttctcaagagtttgtctttcttgctaaatctgcagtgaactacaacccaaatgcacaaaaccctgtcatcactcatccccaggatggctctgtctgggatgttgaatcatggatgaacgatctctccgatgaccctgaagtcgttaacctgctgtgggagattatcggcgctatcgtgcgcccctatgtgtcctggaacaagtctgcctggttctactcagaggccggcaacaacggtaaaggcacgctcgttgagctcatgcgcaacatcttgggcgcagaggcctataccagtatccagctctcggacttctctaaagagttccaccttgaatcactgactcgtgcacaagcaatccttgttgatgagaacgatgtcggcgccttcttagaaaagtcagcaaaccttaaagcgattgtcaccaatgacgtcatctccattaaccgcaagcacaaaaccatgctcagctatcagttttatggctttatggtgcagtgtattaacggcttccccaaggtcaaagaccagtcggagtcatttttcaggcgccaactctttgtgccgtttgagaaaagcttcaccggtgccgagcgcaagtacatcaaagacgactacatgtcgcgcactgatgtcctcgaatatgtactgcaccgcgtactgcatatgaactacgacaatctctccacccctgctgcagctctcgctgtgctggatgaatacaaagagtttgtcgatcctgtgcgcgcattctggaatgaattcagcgatcaatttgtctgggatcttcttcccctgcaattcctctacgagttttatcgcaagtggtttgaccgtgacagcccatccgggtctgtgctcggcaaacgcagcttcattcaaaaaatcaccaccatcgccgttgatagcggtcagtgggagtatccgctgacagcacagcgtcccggtggcgatatggccgttcctgagccattagtcattgattatgacctcaccgagtggcaaaacgccactgtacctaaaggtcacgtcaacaaggggctccctctaccactcaaggctaattatcgaggactgctccgcaaacctctaacaacacctgctactccccctgcagcgccggtcaaccccacaccacccaccccttaacaaccacaagaaagatttat

SEQ ID NO: 1558 - protein, 591 aa, Corynebacterium glutamicum
MSDTTDSHDPATSPTVDSAASGTSDPNQQPKKKFTIIKQVNMIARTAIDDCINRLGPDVVTMSSEDIADQVVNSINVAIARENTRAQDANAAVRYTPIFKLDFSHVAVLMRRLHVIINIAPSHNSDPDSDMLAIYDPNPRSEHYGIYRTSEAEIRRVAREYCPDLTSAQFRELQMALSDAAPRKVRHKQRDLIPVKNGIFNYSTKQLEPFSQEFVFLAKSAVNYNPNAQNPVITHPQDGSVWDVESWMNDLSDDPEVVNLLWEIIGAIVRPYVSWNKSAWFYSEAGNNGKGTLVELMRNILGAEAYTSIQLSDFSKEFHLESLTRAQAILVDENDVGAFLEKSANLKAIVTNDVISINRKHKTMLSYQFYGFMVQCINGFPKVKDQSESFFRRQLFVPFEKSFTGAERKYIKDDYMSRTDVLEYVLHRVLHMNYDNLSTPAAALAVLDEYKEFVDPVRAFWNEFSDQFVWDLLPLQFLYEFYRKWFDRDSPSGSVLGKRSFIQKITTIAVDSGQWEYPLTAQRPGGDMAVPEPLVIDYDLTEWQNATVPKGHVNKGLPLPLKANYRGLLRKPLTTPATPPAAPVNPTPPTP

SEQ ID NO: 1559 - DNA, 1560 bp, Corynebacterium glutamicum
  CDS (101)..(1537): RXA00025
taaatttctcaatggtgtggaaacacttggaaacaagctgcccacaccatttacgcttttcttgatacttttcctgatcacggcgctggcttcatcgatcatggcgtggatgaacgtatccgtgattgttccaggctctgatgaggaactatttgtaaaaggcctgttcaccggtgaaggcctaacctggttgactacgaatctcggggcaaactacatcgggttcccgccgttgctcaccgtgttgccaattctgttggcagtgggtgttgctgaacgttccggcatgttggctgcgctgattaggaaactttttggttcggcgaaaaagatcgttttgccatatgcagtcggtgtgattggcgtgaccgcgtcgatcatggcggacgctgccttcgtggtggtgccacctttggccgcgatggtgtttaaagctgctggtcggcaccctgtggctgggctattgggttcgtttgcagctgtgggtgcaggatattccacagcgattgtgcccaccagccttgatgcactttttgcgggaattaccaacgccgtgatggagacacttccaggcattgcgacaactgaagtcaatccggtttctaactattacttcaatattgcatcctcgattgtgttgggtctgttatgtggtttcctcattgataaggtgctggaacctcggatgtggcgtcagaaaatcgctacggagtatgcagaaagcattgaacccaccagcgcagcagatgatgaggaaatctctgcaaccctaaccgcacaggaaaaccgcgcgctgacaatttccatgtggaccaccctggcgacggccatcatcgtgctggttgtggtgctgattccgggatccccatggagaaatgaggatggtggattcttgcctacctcgccactgctgagctctgtggtgtttattgtatttttgtttttcatggtgatgggcctggcctacggcatggtggtgggcacgatcaagaacatggatgatgtcgtgaacatgatgggcgaagcaatcaaggacatgattggtttcttggttttggccttcattttgggacagtttgtggcgctgtttaactggacgggcatcggtacctggactgctgttcagggtgctgcgggattggaagcgatcgggcttaccggattccctgcgatcattgcatttattattttggcgtcatgtttgaacctgctgattatttccggctctgcgatgtggacgctgatggctgcggtgttcgtcccgatgttcgctctgcttggctatgaaccatcattcattcaggcagcattccgcgtgggtgactcggcaactcaggtgatcacaccgctgaatccgtacatgattgtgatcctcggtttgctccgtcgatacgaaccggatgcaggtttaggcaccttgatgtcaaggcttatcccatttgtgatccctttctggctagcctgggctacattgttggcaatttggttctacgccgatttgccgcttggacctggctctgcgatcttcctcgaaggataagttttcatgagtactgacaa

SEQ ID NO: 1560 - protein, 479 aa, Corynebacterium glutamicum
MAWMNVSVIVPGSDEELFVKGLFTGEGLTWLTTNLGANYIGFPPLLTVLPILLAVGVAERSGMLAALIRKLFGSAKKIVLPYAVGVIGVTASIMADAAFVVVPPLAAMVFKAAGRHPVAGLLGSFAAVGAGYSTAIVPTSLDALFAGITNAVMETLPGIATTEVNPVSNYYFNIASSIVLGLLCGFLIDKVLEPRMWRQKIATEYAESIEPTSAADDEEISATLTAQENRALTISMWTTLATAIIVLVVVLIPGSPWRNEDGGFLPTSPLLSSVVFIVFLFFMVMGLAYGMVVGTIKNMDDVVNMMGEAIKDMIGFLVLAFILGQFVALFNWTGIGTWTAVQGAAGLEAIGLTGFPAIIAFIILASCLNLLIISGSAMWTLMAAVFVPMFALLGYEPSFIQAAFRVGDSATQVITPLNPYMIVILGLLRRYEPDAGLGTLMSRLIPFVIPFWLAWATLLAIWFYADLPLGPGSAIFLEG

SEQ ID NO: 1561 - DNA, 525 bp, Corynebacterium glutamicum
  CDS (101)..(502): RXA00031
cacacatcgcctcgtcatccttagacacgccaaatcttcctggtccaccggagtactcgaccataaacgcccacttaatcaacgtgggcttcgcgatggcgtggcagctggccaatggctagctggcaacatcggcgaaattgatcatgtgctgtgttcagatgccacccgcacacaattaacgtgggaacgcgtccagcttggtggcgcaaccgccaaaggctctagcttccacaatgacatctatgaaaaccaagtgtctgaatttaaacatttaataacagggctcccagatgtagttggtaccgccctactcatcgggcactggccaggcgtggaagaactagcccattattttggcatccgcgatgaacatcccggttgggatcagatggaagaaaagtttcccaccagcgccattgcggtgttggaatttaacaccccttggtcaaaacttgagagaaactctgctcggttgacagattttgtcattccacggggttagttctgcttcaattgaacaat

SEQ ID NO: 1562 - protein, 134 aa, Corynebacterium glutamicum
VAAGQWLAGNIGEIDHVLCSDATRTQLTWERVQLGGATAKGSSFHNDIYENQVSEFKHLITGLPDVVGTALLIGHWPGVEELAHYFGIRDEHPGWDQMEEKFPTSAIAVLEFNTPWSKLERNSARLTDFVIPRG

SEQ ID NO: 1563 - DNA, 810 bp, Corynebacterium glutamicum
  CDS (101)..(787): RXA00049
ctgaatcatgattcataaatgaacaagggttcagattttacaatacccccattccacccccttatatttaagtcaccgcagatcagctaaggttttccctatgcccacgccttcgcagcacaaggacgcttcaacagcacaaaccgacaaccaggtaccaactggccgccgtgcacaaaaacgcgaacaaacccgcgcgcgcctgatcacttccgctcgcacactcatggcagaacggggtgtcgacaatgtaggaatagctgaaatcaccgaaggcgcaaacatcggaacgggaaccttctacaactacttcccagaccgtgaacaactactccaagctgtcgcagaagatgcctttgaatccgtgggaattgccctcgaccaggtgctaaccaaattagacgatccggctgaagtatttgcagggtcgcttcgacatctagtacggcactcgttagaagatcggatttggggcggatttttcatacaaatgggtgctgctcatcccgtactcatgcgcatcctaggaccccgcgcacgccgagatctacttcatggtttagaaactggccgattcaccatcgaagatctggacctagcaaccacatgcacttttggttcactcatcgcagcgatccaaatggcgctttctgcagatcaagattccaacgatgacaaagatcagattttcgcagccgcgatgctccggatggtgggtgttcaagcagcagaagcccgggagatcgcttcgcgtccactccccgaaatatccccagtcaaaccgcagtagtgatcgggcctcaaataaac

SEQ ID NO: 1564 - protein, 229 aa, Corynebacterium glutamicum
MPTPSQHKDASTAQTDNQVPTGRRAQKREQTRARLITSARTLMAERGVDNVGIAEITEGANIGTGTFYNYFPDREQLLQAVAEDAFESVGIALDQVLTKLDDPAEVFAGSLRHLVRHSLEDRIWGGFFIQMGAAHPVLMRILGPRARRDLLHGLETGRFTIEDLDLATTCTFGSLIAAIQMALSADQDSNDDKDQIFAAAMLRMVGVQAAEAREIASRPLPEISPVKPQ

SEQ ID NO: 1565 - DNA, 834 bp, Corynebacterium glutamicum
  CDS (101)..(811): RXA00052
agctaaagttctaatttcctaaattggtaaagatcggaactcaaaaatgtcgcttcgaaagctcacaagcttaattggcatactggctgttgttggcctagtggcgtttatccttttcaacttcgtgaaaacaaacgacgaaacatcgaatgtctctcagagcgagtcaactgcagagacagtcagcgaaacaaatggcgtgctctccgacggcgcagaaaacatcgcttctcaatctgatgagagtaaatcgggtgtagagattattgattctggatttgggcagagctcaaattcggcgatggcaattgttattgccaaaacttctggtggaagcctcgcaggggaatttgttacggcgacggtgaatttcctcgatgaaagtggcgccgttgtagcgactgaagatcaagtagaaacactcagttgggaagaccaggaattggtattgccagtatctcactacaaggaggattcaagccgcccagaaattacaagcattgaggcttttctttcagtaacggattacggttcaggacaaccagatgaaactgcattgccggtgttggaaaccaccgatatttccaacccatacgctggtagttacaatgcctcatttgcgttgaaaaatgactcctcagatgattttaagaacctgagagttggtattgtttgctacaacgagcaaactgacatcattggtggtggtttcaaatttccgaacctggttccagcgggtgggagtattcgaatggacgctagtgtgacggtctccgaaatgccagcttcttgtaaggcatatttaaatcactaatagattcttaaaaggcagca

SEQ ID NO: 1566 - protein, 237 aa, Corynebacterium glutamicum
VAFILFNFVKTNDETSNVSQSESTAETVSETNGVLSDGAENIASQSDESKSGVEIIDSGFGQSSNSAMAIVIAKTSGGSLAGEFVTATVNFLDESGAVVATEDQVETLSWEDQELVLPVSHYKEDSSRPEITSIEAFLSVTDYGSGQPDETALPVLETTDISNPYAGSYNASFALKNDSSDDFKNLRVGIVCYNEQTDIIGGGFKFPNLVPAGGSIRMDASVTVSEMPASCKAYLNH

SEQ ID NO: 1567 - DNA, 3036 bp, Corynebacterium glutamicum
  CDS (101)..(3013): RXA00054
atgctgagatccgctgggtggcaccacacgaattggaatctttggagtgggcacctgctgatattcctgcggtgaaacttctcgtcgagcagcttgcttaatgagcccattcgattcaaagcttggtcgcgatacccattttggattcctcgataagaccactgcttcgcaacaactgctgaatccttcattgatttctaatgaggatccgcacaccatgttgcaggcgatcaagttagagcttcgtaccgcacagtcttttacattttcagtcgcttttatttccagtcgcggtatcgcgttgttgaaacaggcattgttggacttcaagggtaaaggacgaattatcacgtcccgctacctggatttcaatgatccaacgatgtttcgtgagcttcttactttggagaacgtggaagtcctcatacatcaaggcgatggtttccactccaagggctacgttttccatcacgacgtgggaatcaccgcagtagtgggtagttccaacctcacagataatgctctgttggtaaaccgggaatggaatctgaagttctctgccagcaagaatggcgacattgcttttcaacttgatgatgcgattaatcgccaaattgaacgatccacgccactgacgcctgaatggatctcagagtatgaggcaaccagacgtgtacctgagcgtttggtgtctcagaatattcctctcgaggatcaaagtaacgccggaacaattgttccaaacgtcatgcaggaagaggccctcgacgctctactttctttgacggagaagggagagaaacgtggtgtcattatttctgcgacaggaactggcaagactatcctggctgctctagctacaagaatgctcaagcctgaacgagttttgtttgtcgtgcaccgcgaacaaattctggataaggcgcgatccgagttcatcaaagttcttgaacgtcccgctgttgatttcggaaaaatgtctggctcgaccaaggagctagataagccgtttgtgtttggcaccatccaaacgctgacaaaggaagctacactttcccagatctcccctactgactttgatttagtcatcgtcgatgaagtccatcgcgccggtgccgaatcctatttggcattgctcaatcatctgcagccacagtttttattgggcctgactgctaccccagagcgaactgatggattcaatatttatgagttgttcgatttcaacgtgccatatgagatccgacttcaagctgctttagaatccaacatgctcgtaccgtttcactattacggtgtcacagacttcacgcttgattctgaaacaacggtgactgatacctccaaactaagtgccttggtgagcgaagagagagtccatcacattctggaggccctcaaaacttatggtcatccagaaaatgttcgtggactgatcttctgttccaagactgaagaggctgaggagctgtcaaaacttctcgaccagtcgttgtttaatggcagcttgcttaaaaccaaggcgctctctgcgaaggactcaattccctaccgcgaagaggttgtagctgagctggagtccggcgacctggactacatcttgacggttgacatcttcaatgaaggcattgatattccttcggtgaatcaaatcgtaatgattcgtagtactcaatcaagcattgtgtttacgcagcagctcgggcgtggactccgaaaagctgctggcaaagaccatctgcgcgttattgatttcattggcaactacgcgaacaactatctcattcccatcgcattgtttggcgataattctcgcaataagaacagcatcagacgccgcctgattgagagcgatattgatggaacaatctcaggtgtttcaagtgttaactttgatcccatcgcgcaggagagaatttttgctgcgttgaaggctgcgaagttggactcaaaagcacaattcaagcaggatattgttcagcttcaagatcgactcaatcatgtgccagcactgttagacttcgctcgcttcaatactgttgatccgtttatccttgccacgcattctggcaactactggtcgctgctcagttcagtgaagtttgtcgatcacgctcccagcgaatcggagaagtactttctggatttccttaccggagagcttcttaacggcaagcgacctcatgagctgttgctgatccaggaactaatgaaacagcctgaaacttctactgaagaattccgtaagctcttgcaggcccaatcgactagttcagatgagcaaacaatcaactcggttgaaaggattttgagccaagaattctatacgggaccaaaccgcaagaagtttggcgaacatccgatcctctctgttcaaaaccgcacctactcttttactcccgagttccgacgtgccctcgacgaaagcctagaagtgacggaccgagatgaggctgctcagaattttaagtttcacgtccaagacatcatcgacactggtttgtttatcgccagaaacaatggattttggcaaggaaacctcgttgttggcgagagatactcccgacgagatgtctgccgaattctcaattgggaacgaaacaacgagagcacgatttatggatacaaagtggacagttacacatctacttgcccaatctttgtgacctatcacaaggctgatgatgtatccgaaagtactcgttaccaggatgaactcgtcgatccgaatacccttcattggtattcccgcggcaaccgaaagatcacgtctaatgagatcaagcccatcgctgcgaatgctgtggatcttcatgtttttgtgaagaaggacgatgccgaaggccttgatttcttctaccttggtcaagcgcattcagaaaacagcaaacagtcatcgatgcccggaaacaaaggagttgtgcaaccggtggtcacaatggatctacagttcgacacacccgtcgaacaaagcctgtttgagtacctgagcacaaatctcgccgtaacggagtaaccaccgcaaccaagcgtcga

SEQ ID NO: 1568 - protein, 971 aa, Corynebacterium glutamicum
MSPFDSKLGRDTHFGFLDKTTASQQLLNPSLISNEDPHTMLQAIKLELRTAQSFTFSVAFISSRGIALLKQALLDFKGKGRIITSRYLDFNDPTMFRELLTLENVEVLIHQGDGFHSKGYVFHHDVGITAVVGSSNLTDNALLVNREWNLKFSASKNGDIAFQLDDAINRQIERSTPLTPEWISEYEATRRVPERLVSQNIPLEDQSNAGTIVPNVMQEEALDALLSLTEKGEKRGVIISATGTGKTILAALATRMLKPERVLFVVHREQILDKARSEFIKVLERPAVDFGKMSGSTKELDKPFVFGTIQTLTKEATLSQISPTDFDLVIVDEVHRAGAESYLALLNHLQPQFLLGLTATPERTDGFNIYELFDFNVPYEIRLQAALESNMLVPFHYYGVTDFTLDSETTVTDTSKLSALVSEERVHHILEALKTYGHPENVRGLIFCSKTEEAEELSKLLDQSLFNGSLLKTKALSAKDSIPYREEVVAELESGDLDYILTVDIFNEGIDIPSVNQIVMIRSTQSSIVFTQQLGRGLRKAAGKDHLRVIDFIGNYANNYLIPIALFGDNSRNKNSIRRRLIESDIDGTISGVSSVNFDPIAQERIFAALKAAKLDSKAQFKQDIVQLQDRLNHVPALLDFARFNTVDPFILATHSGNYWSLLSSVKFVDHAPSESEKYFLDFLTGELLNGKRPHELLLIQELMKQPETSTEEFRKLLQAQSTSSDEQTINSVERILSQEFYTGPNRKKFGEHPILSVQNRTYSFTPEFRRALDESLEVTDRDEAAQNFKFHVQDIIDTGLFIARNNGFWQGNLVVGERYSRRDVCRILNWERNNESTIYGYKVDSYTSTCPIFVTYHKADDVSESTRYQDELVDPNTLHWYSRGNRKITSNEIKPIAANAVDLHVFVKKDDAEGLDFFYLGQAHSENSKQSSMPGNKGVVQPVVTMDLQFDTPVEQSLFEYLSTNLAVTE

SEQ ID NO: 1569 - DNA, 687 bp, Corynebacterium glutamicum
  CDS (101)..(664): RXA00058
atcactaggctatcttccggttcacctgaagttagtaacacaccggtcacagaagttccggctcgtgtaatctccgcttatctagctcaaaggaatacttatgaagttcttcgggttttatcgtcctattgctttaattgctggcattaccgtttcagcatctattctcacatccgtagctactgcagctgaatctccaactagctttcaagcgattacacctgcattctcttcatcatcggctccagaagcagacgcagaagcaaacaccagtgaagctaccgcagacctgctttacgtggcagaaaaccaactacttattaagctttctaacgccgtcgtcgaagatgttaacggcgaaatcttaatgaaagataataagggcactcttctggagaatttgacagctgaacttcaagcccaaccaggcttctcaatcgagaaagtcgattcccatactgctttgttgaccatgaatccagatgaggtgccagatttacaggactggcgatgcggagtcggcgctttgtcaggcggggtagcaggtgtggtggcaactggtctagctctcgccgctttgggagttgccacaggtggcacggggtttgctgtgcttgcagcagggggacttgctggatatggcactggcgctgtcgccaactgctaaggagaaataatgggaattgt

SEQ ID NO: 1570 - protein, 188 aa, Corynebacterium glutamicum
MKFFGFYRPIALIAGITVSASILTSVATAAESPTSFQAITPAFSSSSAPEADAEANTSEATADLLYVAENQLLIKLSNAVVEDVNGEILMKDNKGTLLENLTAELQAQPGFSIEKVDSHTALLTMNPDEVPDLQDWRCGVGALSGGVAGVVATGLALAALGVATGGTGFAVLAAGGLAGYGTGAVANC

SEQ ID NO: 1571 - DNA, 405 bp, Corynebacterium glutamicum
  CDS (101)..(382): RXA00059
ctggcaggcgattgttctcttactacttgcgctaggtacaggtggtgcctatctgctggccggtggtgatgtcactcaaactgcccgactggtgttgtgggtgttgaccggaatcttactggctatggtctctaccgccctacgaatccgcttcggatcaggggtagctatcgctgcaaccgtgctgtggacagttatctcaataaccttgggcggagatgtgctagccgagaccatgctctggcttgtagcagtaccatcctggccagaaacagcggatactactacccgcttccttattgcgatgctactgcaggcagttcttatcaccggcagcactatctgggctatccgagagatccgggattcagagcgccgtggctaagttcagcacctccgacaacg

SEQ ID NO: 1572 - protein, 94 aa, Corynebacterium glutamicum
VLTGILLAMVSTALRIRFGSGVAIAATVLWTVISITLGGDVLAETMLWLVAVPSWPETADTTTRFLIAMLLQAVLITGSTIWAIREIRDSERRG

SEQ ID NO: 1573 - DNA, 396 bp, Corynebacterium glutamicum
  CDS (101)..(373): RXA00065
atgcttctcagacgcctccctctccttcaaatccgccaccgattccagcgtcactcccatgcatgcccaaccgggacagatcttgccgtgcgtaggaattatggcgaatcttccccaagagggtttttctgtggtgcacggaattttggcggatccccgcatttggggcccggagattccgtatgttcgtgaagaagcaggtcaagtaaatgtggaagcacccgacgaggctggcgatctagcccgattgacgttgcctctgcagttgatcctgctcacggaggaagagtttgccatcgctctcaacgagggcagcgacgtcatgttcgaacgaatggcggagcaagaagtcgatcttctggatctgaaacgttaagacggtaggctcaattccgt

SEQ ID NO: 1574 - protein, 91 aa, Corynebacterium glutamicum
MANLPQEGFSVVHGILADPRIWGPEIPYVREEAGQVNVEAPDEAGDLARLTLPLQLILLTEEEFAIALNEGSDVMFERMAEQEVDLLDLKR

SEQ ID NO: 1575 - DNA, 705 bp, Corynebacterium glutamicum
  CDS (101)..(682): RXA00068
ggctgctaaacggcaaccaatagagcgataattcgctaaggcgaatgtaatcgcagcaacatatagcaccggcttaacaggccggtgctattctgttcgcatgacttcgaaggatctgattgtgacctcctatacgtcttggggcaagcgtttcaagaatgacgggaagctttttattaacctacttcgcagcaccactgatagtgctgatgaaaaggttttagccactttcggtgaagttcccagcaaatcatttgaaaccaccgcaacggttgatgagcagcagtgggaactgtccttcagtattgatggaacggcaactgccaagcttcctgatggtcgtgtgttcagcgcgaatgcaggtgagaagacctttaccaagtccaagcggattgaaatcgacatggacggcaccgcgatggctgctgttaatgaagataaaaacaattggattatcgacgattctgaagagaataaagtcgctcagtttaccggtatgaacaacggtgtgcgtcgcgcgattgtggagtttgagcctgacgtagaagtcacccaggagcaggaaattttcttgtcgtgggttgctcggaaaactctggaatcccgcatgttgggctccagttggggactgactctgtttttgatcattttgacgccaatcattattttcctcactttcagctaaaaggaccatgcaatggtaga

SEQ ID NO: 1576 - protein, 194 aa, Corynebacterium glutamicum
MTSKDLIVTSYTSWGKRFKNDGKLFINLLRSTTDSADEKVLATFGEVPSKSFETTATVDEQQWELSFSIDGTATAKLPDGRVFSANAGEKTFTKSKRIEIDMDGTAMAAVNEDKNNWIIDDSEENKVAQFTGMNNGVRRAIVEFEPDVEVTQEQEIFLSWVARKTLESRMLGSSWGLTLFLIILTPIIIFLTFS

SEQ ID NO: 1577 - DNA, 345 bp, Corynebacterium glutamicum
  CDS (101)..(322): RXA00079
gatagcgcgcgatcttcctaggctgcccgcttgggcttcaggtttagcaagcgggacgctttcgcttatcgacgccaactccctccatttggaatcccccatgggcctagttcacaccgaattcaccccaataaacacctacggaatcctcgaccacgtagtcaccctccccgacggaactaaagtgctcaaccctttccgagtcatcccccacgacaccggctccgaactcattttcaccgtccgccccaacgaaaacttcgaagaagattgccaagcagtcgcagcagacctcgaaaggctggtcgcactggccgaaaaatgaccccacagaatggtctctaa

SEQ ID NO: 1578 - protein, 74 aa, Corynebacterium glutamicum
MGLVHTEFTPINTYGILDHVVTLPDGTKVLNPFRVIPHDTGSELIFTVRPNENFEEDCQAVAADLERLVALAEK

SEQ ID NO: 1579 - DNA, 666 bp, Corynebacterium glutamicum
  CDS (80)..(643): RXA00082
cacttgaaggcgaagaactcgaccagtttgttgaagatgaaattgaccgaattgatcagctattcaagaagatgggctagtgaacgtcactgaacaatccggcgagtcccatatcgacatcccggaatcacaccagctgcccggacctcgtccagttggcgagggcactttctgggaaggccgctccgggctcatcatgcccgcaattcttacggcatttagtttgtatttgctcatcggtgttttaaacatggatgtgggcaatgcagcattcccaggacctcgattcttcccaacaatcctcggcatcgcgggtttgttggtggcagtggcattgaccattcaaaccatcaagtaccccatgcatccagaaaatgaatctggccgaagctggaaattccactctgattacgtctcactcgcgtgggcgatcggtggcttcttcgcctttgcagtcttgcttccatatcttggctgggtccttgctggctccttgttgttctggacaatgaccagggctttcggttccaaacgcccaggtttcgatgttcttgtttccctcatgatgagctccgtggtctacctcgcattcgatgtgggcttgggacttaatcttccttccggacttttgggtggtggcttttaatggatattttgtccctcttg

SEQ ID NO: 1580 - protein, 188 aa, Corynebacterium glutamicum
VNVTEQSGESHIDIPESHQLPGPRPVGEGTFWEGRSGLIMPAILTAFSLYLLIGVLNMDVGNAAFPGPRFFPTILGIAGLLVAVALTIQTIKYPMHPENESGRSWKFHSDYVSLAWAIGGFFAFAVLLPYLGWVLAGSLLFWTMTRAFGSKRPGFDVLVSLMMSSVVYLAFDVGLGLNLPSGLLGGGF

SEQ ID NO: 1581 - DNA, 423 bp, Corynebacterium glutamicum
  CDS (101)..(400): RXA00083
gaagatacagggggccacggtggggtggtgaacaagagcaggcacgaggcctggtagatacggattcgaccaagaaaacgtacaccactcaggagcactcgtgcttgcccttccatcctctatcatcgaccccctctggtgccagttcgccgcgctgatcccacccgtgaccgacacccacccacttcggtgccaccgcccacgcatcccggaccggatcatcttcgacaagctcatccaggtcctcgtcctcggcgcctcctatgccaagatcgccgacacgacatgctcggccaccaccttgcgcacccgccgggacgagtggatcaccgctggcatcttcgagcagctggaacagatctgtttggaattctacgaccgtatcgtcggactcgatctctaagttcggattggctcgaattg

SEQ ID NO: 1582 - protein, 100 aa, Corynebacterium glutamicum
VLALPSSIIDPLWCQFAALIPPVTDTHPLRCHRPRIPDRIIFDKLIQVLVLGASYAKIADTTCSATTLRTRRDEWITAGIFEQLEQICLEFYDRIVGLDL

SEQ ID NO: 1583 - DNA, 2346 bp, Corynebacterium glutamicum
  CDS (101)..(2323): RXA00093
aaagaatcgattccggtgccgcaggcctccttgtcacccacgaaccccgcttcgccgcgtgggcagaccgaacaatcatgcttagggatggtgaaatccagtgaccacacttctagcagcaacccgccccaccctgcgcgatgcctttaaacacccatggcgatcgctggcagccatcttgttggtggccgtaccgatgttcctggtgagtttctttcttacctatgatcaatcaatcaacaatgcagctagctatcctggttcccaggtacaagctcactatgacggagaaggagcctaccaactcctccaagaaaaccttccagaagacttccacctggaactctttgccaatggttatccagaagtctccttcggtgatgaagaagtcaatttctttgttgtgcaatcaacaaacgtacaacaagcctcatttcccgccgatgcactcgatgttttaggtgccacaatcggtgataccgtgaccattcacggcaccccggtggaagttcagtcgatttctcccacaaatatcttattgcccgaaggtactctgttttctcttgagaatttctccgaatcagaaactttttccggcacctggtacttccccggatcgaatttcaccgaagaaaaccgacaagcactagaagcagttggctttgaagttaatgaatatcggcgcggccccatatccgtcgacccaaatttgatcccaagctacatcatgggatttttatcgacgacaattctcgccgtcgttgcactcatgctgatctcaccagtatttacaatttccgcctcaaggcaaaccagaactttcgcactgctcgcctcacagggtgccacacctagacacattcggtgggcagtgcttacatatgggctcttcgcaggtcttgttggggcatccattggtttagttctggggcaaataggcatctacggctggtggaaatacacctatcctgaattctccctcaccaccccctggctagttcttgtaggtttttgggcgctggcaatcatcgcttcaacgattgctgcattcttaccggcagtttttgtcagtagatcaagcatcatcaacggaatctacggaggaatctccgacaaaatcatccggtggagccctcgaatgctcatcgggccaatcgtcttaattgcagctgcggtaatcgccttgtttatcggtgacggagagtggggaggcgtcgtcaagcaattatgcttcctggcagccgtcatcgccctgccggcctcagtgcctgcggtgttgtgggcgcttgggcgcctgcctggtttgacattcaaactagctacgcgcgatatgctgcgccgatcaatgcactccattcctgcgattggtgcgctggcggcagtgattatgcttggtacatttatgcaaacaactggacttgcaacccaagccagcgatagagaagctaccgcctcggtgtatcctgaggccgtattcttacgcggtgacacacaaatccctggactcatggggcaaaaaatcgatgtatacggtgataaccatggctttggtatctatgaactagatgtagatttttactcggccaactatgtgcccgcactgacctcattttttggcggaccagttattgccacgcccaagattttagacatgttcggtgtccacgaacaagccgacatctacgcgccatcaacctataattccgggctgcaagaatacgcaatataccccggcgatgaaacctacatgctagacaccgctgctgttttaccgccgctgtactcacatgttttattaagcccagaaacttttgaagaaatcggaggacaaacagaattcttgggaacaatcgtgcttccccaagaactagatgaccaaactgtacaagcaatcaatcggtcaagagatgcgcatttcagccacgacggccataattcttcacttgcttccagtgctgcactaactgcggtggcaattgtggtcgtttcccttgtgatcgtgctggctaatcgcaaactccaacagcacgcattgattgccatcggagcaacacctggaacaatctacaaagtcaatgccttaaatgcagcgttgcttgcccttgtcggaggcatcatgggccttgtctccggatggattgcagcgctgctgacaggcaccactgatgaaattgttgatggagcaattttgaactacggcacgcttgaacacatgatgctgccgtggcctctgttggtaagcctcctcgttgtggcgccgctggtgtgcgccgtgattggggctatagcttctccatcgggacgccaccaagaagcatcaatctaaccttgccggaggaaccgaaa

SEQ ID NO: 1584 - protein, 741 aa, Corynebacterium glutamicum
VTTLLAATRPTLRDAFKHPWRSLAAILLVAVPMFLVSFFLTYDQSINNAASYPGSQVQAHYDGEGAYQLLQENLPEDFHLELFANGYPEVSFGDEEVNFFVVQSTNVQQASFPADALDVLGATIGDTVTIHGTPVEVQSISPTNILLPEGTLFSLENFSESETFSGTWYFPGSNFTEENRQALEAVGFEVNEYRRGPISVDPNLIPSYIMGFLSTTILAVVALMLISPVFTISASRQTRTFALLASQGATPRHIRWAVLTYGLFAGLVGASIGLVLGQIGIYGWWKYTYPEFSLTTPWLVLVGFWALAIIASTIAAFLPAVFVSRSSIINGIYGGISDKIIRWSPRMLIGPIVLIAAAVIALFIGDGEWGGVVKQLCFLAAVIALPASVPAVLWALGRLPGLTFKLATRDMLRRSMHSIPAIGALAAVIMLGTFMQTTGLATQASDREATASVYPEAVFLRGDTQIPGLMGQKIDVYGDNHGFGIYELDVDFYSANYVPALTSFFGGPVIATPKILDMFGVHEQADIYAPSTYNSGLQEYAIYPGDETYMLDTAAVLPPLYSHVLLSPETFEEIGGQTEFLGTIVLPQELDDQTVQAINRSRDAHFSHDGHNSSLASSAALTAVAIVVVSLVIVLANRKLQQHALIAIGATPGTIYKVNALNAALLALVGGIMGLVSGWIAALLTGTTDEIVDGAILNYGTLEHMMLPWPLLVSLLVVAPLVCAVIGAIASPSGRHQEASI

SEQ ID NO: 1585 - DNA, 531 bp, Corynebacterium glutamicum
  CDS (101)..(508): RXA00101
taaaccgtgcaggagatgccgaaccccaatcgtgaaagccgagttgggggagcgaataatctggtggtgtccgcgctgccaaccgctaaactcgtgaagcatgagactaatactcaacctgatttggttattcttcggtggcatttggctcgcgttgggatacgtattcttcggaatcatcgcatgtatcttcatcgtgacgattcccgccggtatcgcaagcttccgcatggctaactacgcgctgtggccgtttggtaggacggttgttcgtaatcctaaagccggagggttttctgccctgagcaacggactgtggtttatcattgctggactgtggctggcgatcgggcacctcaccaccgcggctgcccaggcgatcaccatcatcggaattccactggcgatcgcaaacatccgaatgatccccgtgacgtgtttcccgttcggcaaagaaatctatgacagcaaccgcattcccttcggctacgaaccgatggttaagttttaattcggcgacggactaaacca

SEQ ID NO: 1586 - protein, 136 aa, Corynebacterium glutamicum
MRLILNLIWLFFGGIWLALGYVFFGIIACIFIVTIPAGIASFRMANYALWPFGRTVVRNPKAGGFSALSNGLWFIIAGLWLAIGHLTTAAAQAITIIGIPLAIANIRMIPVTCFPFGKEIYDSNRIPFGYEPMVKF

SEQ ID NO: 1587 - DNA, 643 bp, Corynebacterium glutamicum
  CDS (101)..(643): RXA00108
gaattgggttttgagcatcgtggcggtgcttgttgttgcaagtgccatcgtcatgatgattgcaaagaatcgtaaccagaaataagagggtttattcaccatgaagaagttttttgtcgcaggtgctgtactgagcagtgcgttggttatggcggcgtgttcgcctgctaatcaaagtgattccacctccacgagcgtggagactacttcctccagcagcacgcaggtaagcgatgctgtgatcaccacggaaaacgctgttgttcgtgcgtctgtggaggacagcgacatgacggcagtgttcgctacgttggtgaacaattctgatgatgagatcaacgtttctggctttactgctgatgttgatgctgccagctttgaggtccatgaggttgttgatggcgtcatgcaggaaaagccaggtggttttgtgatccctgcaggggagagcatcgagctggcaccaggtggcgatcatttgatgatcatggggcttgcgaacccaatcgaggctggcgatgaagtgacggtcactcttgaattggctgatggttctgaagttaagcttgatccgatcccggcgcgcaccattgctgctggtgatgaggattatggcgatctgggaactgaaggccacgagggc

SEQ ID NO: 1588 - protein, 181 aa, Corynebacterium glutamicum
MKKFFVAGAVLSSALVMAACSPANQSDSTSTSVETTSSSSTQVSDAVITTENAVVRASVEDSDMTAVFATLVNNSDDEINVSGFTADVDAASFEVHEVVDGVMQEKPGGFVIPAGESIELAPGGDHLMIMGLANPIEAGDEVTVTLELADGSEVKLDPIPARTIAAGDEDYGDLGTEGHEG

SEQ ID NO: 1589 - DNA, 672 bp, Corynebacterium glutamicum
  CDS (101)..(649): RXA00110
atatcgaatgtccagtcacgctaaacttcacccaagatgagatttcgtggcacgattgggaataacgaacgctaattttaaacactggaggagcttccacgtgagcaacaaagacggcctttttactgacggtaacagcacgtttgcacctaaggtggattcaattcccctcagcgatgtggataccagcgttagcggtgaagcctccatcggcacgctgatctccaacgcaacctcccaaatgtccagccttttccgcgcagaagttgagctggcgaagactgaactcgcaggcgaagccaagaaagctgccatcggcggcggcgcattcagcgttgctggcgtaatcgcactgtacagctccttcttctttttcttcttcgtcgcagcactgctgagcgagtggattaagccttgggcagcattcctcatcgtgttcctcttcatgctggtcatcgccgcagctctcgcactgttcggctggcgcaaggtgaagaagatgggcgctccgaagaacaccatccaatcggtcaaccaactgaagaacctggtcccaggtcaggcatccgagaagctggagaaggccaacaagcgtggcctctacacctccgcgtccttccacagccccggcgccatcactggcgaccactaaaaaaggagacttcgatggcc

SEQ ID NO: 1590 - protein, 183 aa, Corynebacterium glutamicum
VSNKDGLFTDGNSTFAPKVDSIPLSDVDTSVSGEASIGTLISNATSQMSSLFRAEVELAKTELAGEAKKAAIGGGAFSVAGVIALYSSFFFFFFVAALLSEWIKPWAAFLIVFLFMLVIAAALALFGWRKVKKMGAPKNTIQSVNQLKNLVPGQASEKLEKANKRGLYTSASFHSPGAITGDH

SEQ ID NO: 1591 - DNA, 714 bp, Corynebacterium glutamicum
  CDS (101)..(691): RXA00117
gttgatcccacagtatacccccacccctatcttgaataccccccagggtatatggcacacttggaatcgcccatcactttgagattgaaaaggacaaggtatgacttccgctcaaccgattacttccgtagatgcacagactctaaaatcgtggatcgataagcatgaaggactcaccgtcattgacgtccgcactgcacatgagttttcaaatttgcacattaaaggctcttacaacgtgcctctaactacacttgctgagcattccgaagagatttcctctcgtgttggagaacatgttgttttggtgtgtcaatccggcattcgagcaggtcaggcacaacaaaagctggcacctttgggaatttccaccgtggctgttttggagggtggcatcaatagttttgctaaggctgacggtgatgtggtccgcggaacccaggtgtgggatatcgaacgtcaggtgcgttttgccgctggatcattggtgctcgcagggcttgcgggaggtaaattcctttcaccaaaagttcgcaccctgtcgggaattattggtgcgggtctgacattttctggcgtttccaacacctgtgccatgggcaaagctctgtccgccttgccgtggaataaaactaagccagttcctaccgaaaccgagacattgagcaagcttccaagccctaaggagaactaaatgtctatcaccattactga

SEQ ID NO: 1592 - protein, 197 aa, Corynebacterium glutamicum
MTSAQPITSVDAQTLKSWIDKHEGLTVIDVRTAHEFSNLHIKGSYNVPLTTLAEHSEEISSRVGEHVVLVCQSGIRAGQAQQKLAPLGISTVAVLEGGINSFAKADGDVVRGTQVWDIERQVRFAAGSLVLAGLAGGKFLSPKVRTLSGIIGAGLTFSGVSNTCAMGKALSALPWNKTKPVPTETETLSKLPSPKEN

SEQ ID NO: 1593 - DNA, 378 bp, Corynebacterium glutamicum
  CDS (101)..(355): RXA00118
atgggcgattccaagtgtgccatataccctggggggtattcaagataggggtgggggtatactgtgggatcaacgttccagggcaacaaaaggagaaaaaatgcaactcaatcctgatgagatcaccccagtgctcaaccgactcaagcgcgcccaaggtcaactcaccggagtaatccgaatgcttgatgaaggcgaagactgtaaagccgtagtcacccaacttgccgcagtcacaaaagcgctggacagggcaggcttcgccatcattgccacaggtttggaacagtgcctcaccaaccctgatggcgacatggacaaaaaggaactagaaaaactgttcctgtcgctggcttaactatggcctagttcagggcg

SEQ ID NO: 1594 - protein, 85 aa, Corynebacterium glutamicum
MQLNPDEITPVLNRLKRAQGQLTGVIRMLDEGEDCKAVVTQLAAVTKALDRAGFAIIATGLEQCLTNPDGDMDKKELEKLFLSLA

SEQ ID NO: 1595 - DNA, 882 bp, Corynebacterium glutamicum
  CDS (101)..(859): RXA00119
actaatgagaactgtttttcaattggtgcaggatttccacaaggaagctaggggagaggggcttccaatcaagtggggtccatcgcgtggagaatttggcatgctggagtttcctgcagatgtcattcccgagaacatcaaacacattgcgcagacaaagttccagactgaagcaacttcggtggaggatattcgtcgtgcgattaacctgctgagtgatcaggcggagcgtgcgggtgcgtcctttaatcctggtttcattcttgcgcaggtgggctccaccatcgtggaggtttatggcggtgctccggttgcttggctggatgcggttgagctgttgattagtcctgatgtggagtgggttggggttcatggctcaaggaagctcgatattaatgtcagcggagaattgtccggggtgatttctgctggtgacaagttgggtgaactgcttggcgatgattggacaatcaacattgttcacggcgagtacaaaatccagatcgaagatgctcgaccaagtactgcattccttgcggacgcgactgaactgattaatcaggcaaactctgagattgttccgttccatgttcggatgctcagcaactcgaaaattgtgatgtctggctttagtgattattcactagcgggtgatgcgattacatctgcgggaaaactggctgaattggcgaggccttttgcccactggaaagaaaacgtcattcctacgatagaaatagccatggactatgaaccatcaccggtggcagatctttggcagggagattcttcggagacacctgagcctttcgacgattttgagcgcttattgcgggaagaaatgcttattcctgagatttagctggtcatagacctgctgtt

SEQ ID NO: 1596 - protein, 253 aa, Corynebacterium glutamicum
MLEFPADVIPENIKHIAQTKFQTEATSVEDIRRAINLLSDQAERAGASFNPGFILAQVGSTIVEVYGGAPVAWLDAVELLISPDVEWVGVHGSRKLDINVSGELSGVISAGDKLGELLGDDWTINIVHGEYKIQIEDARPSTAFLADATELINQANSEIVPFHVRMLSNSKIVMSGFSDYSLAGDAITSAGKLAELARPFAHWKENVIPTIEIAMDYEPSPVADLWQGDSSETPEPFDDFERLLREEMLIPEI

SEQ ID NO: 1597 - DNA, 834 bp, Corynebacterium glutamicum
  CDS (101)..(811): RXA00121
gatgtccaaatactgcgaaaccatcgaagcgtttcacaaccgtccggcatcagctttcggcgctgtcgaccccatcttctaaacaagaaaggcccctccaatgttgagcgatctgagctccatttttgacttccaagacctctccggcaccttctctgtcgtcgacgttctcatcactttggtcttgtccttcgtcctgacctccatcgtgggtgtggtgtaccaaaagacccaccgccacatctcctacagccagtcattcgtacaaacgttggtgctggtgggaatggtcattgcaatcatcatgctggtggtcggctccaacattgcacgtgcattcgccctggttggcgcgctttcggtgattcgattccgcaacgcagtgaaagaaacccgagatgtgggcttccttttccttgccatggcaatcggcatgacttgcggtacccgcttctacgttctggcgatcgctgcaaccatcgttgtctgtggcgttctgttcatcatgtaccgcttcgactggttcaaggctgatatccagcgccaggtcatcaaggtgcaggtcccagccgatggacaagctgattccggcaggtcctacgcagaagaagttgaactgatcctcgcacagtactgcacttcctttgagatgatgtccgctgaatctgtccgcggcggagccctgaccgagttctcctacaccgctcaaatgcgcaagaacgtgaagccacatgagctggtcgccaagatgcgcgatgtgaactacggccaaaaagcgactgtcctgaccggtcacgatcaaacggatgtatagaaaatgcctagctttaaatc

SEQ ID NO: 1598 - protein, 237 aa, Corynebacterium glutamicum
MLSDLSSIFDFQDLSGTFSVVDVLITLVLSFVLTSIVGVVYQKTHRHISYSQSFVQTLVLVGMVIAIIMLVVGSNIARAFALVGALSVIRFRNAVKETRDVGFLFLAMAIGMTCGTRFYVLAIAATIVVCGVLFIMYRFDWFKADIQRQVIKVQVPADGQADSGRSYAEEVELILAQYCTSFEMMSAESVRGGALTEFSYTAQMRKNVKPHELVAKMRDVNYGQKATVLTGHDQTDV

SEQ ID NO: 1599 - DNA, 1746 bp, Corynebacterium glutamicum
  CDS (101)..(1723): RXA00122
gatgcgcgatgtgaactacggccaaaaagcgactgtcctgaccggtcacgatcaaacggatgtatagaaaatgcctagctttaaatctgctcgatggaggatgaacagacgcctcttcctaggaacttccgcagctatcatcgctgtcggtggcgtgctcggtggagtgcaggttgtaccttatatttcctctggtgaaatccaaacgtcagcatcatcgactgccacgatcgatgtcggtgcaggcaatgtcgatatttttgatacctccgtttcccatgaaatcagcctgcaggtttcgcaggaaagcctcgatgagatgctcgcggactatcaagaagacggttccaaaacctgggtgaaagcaaccatcacgattgatggcgtgaccattgaaaacgtcggcatccgcctcaagggcaactccacgctgtccgggttgggtcgaacatctgaagaaggcggacctcaggcaccagaaggcgtcgaagagtttacagatctcagtgaagaggaaatcgcccagtttgaggaacagttcgcggcgcagcaagagactactgacgcttcagagaccggtgaaactgcggaaaatgaagagactcgcggccccggcggtggcatgggtggtggcggcatgggtggcatgacttcggtcgatgccgacgatgtcagcacctggccacttctgatcagcttcgacaaatacgaagacggccgcgtctaccaaggcatgacccaactggcactacgccccggcaccaccgtggtcaacgaagcaatggcgctggccctgaccgcagaaaccggccaggtctcgcagcaatccagcttcacaacgttttcgcttaacgacgagccctccaccactcgactccttttgaagcaccccgatgaaaattatgccgacgcgctcggcaacggagtcctcttcaaagcagattccaacagttccttcacctaccaaggcgaagaccaaactgaatacgacggacagttcaagcagatcaacggtgacggcaacggagacatccaaccgatcatcaacctgctgaaatggctcgacaccgcaagcgatgaagagtttgctgaacacctctctgactacgtcgatgtggaaagctttgctcgctacgttgccactcaaaacctgttggtaaattccgacgacatggctggtcccggtagtaattactacctgtggtacgactacgacaccggcctgatcagcgtgatctcttgggatttgaacctcgcaatgtccggctcaactgatgctggcccagatgatgaaatctccatgggcggaggtggcggtggcggaatgcgtcctggtggaacgaccgacactgaaattgaaggtactgcgaccgaggatatgcctgacatgggcaatatgcagcaacgtgaacgccctgaaggaatgccagacatgggtgagatgcctgatatgggtgaccgggaaggcggtggatcgatgggaggaaaccagctcaaggaacgtttcctcgcttccgatgcattcacggaaatctatgagcaggtgtactgggagctgtatgaagaaatgtatggttccggaactgccatcgagttgttggatgagattgcagcgtcaattccagaaactgatgcggtgactgcagatgagatcgctacggaagtggcgtcaatgcgggaatggatcactgcccgcacagaagcgttggctgctttgcaagagtgatcaaactagaaaaccaacaa

SEQ ID NO: 1600 - protein, 541 aa, Corynebacterium glutamicum
MNRRLFLGTSAAIIAVGGVLGGVQVVPYISSGEIQTSASSTATIDVGAGNVDIFDTSVSHEISLQVSQESLDEMLADYQEDGSKTWVKATITIDGVTIENVGIRLKGNSTLSGLGRTSEEGGPQAPEGVEEFTDLSEEEIAQFEEQFAAQQETTDASETGETAENEETRGPGGGMGGGGMGGMTSVDADDVSTWPLLISFDKYEDGRVYQGMTQLALRPGTTVVNEAMALALTAETGQVSQQSSFTTFSLNDEPSTTRLLLKHPDENYADALGNGVLFKADSNSSFTYQGEDQTEYDGQFKQINGDGNGDIQPIINLLKWLDTASDEEFAEHLSDYVDVESFARYVATQNLLVNSDDMAGPGSNYYLWYDYDTGLISVISWDLNLAMSGSTDAGPDDEISMGGGGGGGMRPGGTTDTEIEGTATEDMPDMGNMQQRERPEGMPDMGEMPDMGDREGGGSMGGNQLKERFLASDAFTEIYEQVYWELYEEMYGSGTAIELLDEIAASIPETDAVTADEIATEVASMREWITARTEALAALQE

SEQ ID NO: 1601 - DNA, 579 bp, Corynebacterium glutamicum
  CDS (101)..(556): RXA00127
ttgtggggcgccgggggcgtcgttatgcagtgactgccagcgtgtgtggaggaagccgccaacattggcgcggcttgatttagatttaccggtgtggacgttgtcgccgtatgacggcccgcatcgcaacgtgctcattgcgctgaaggagcacggccgtgcagaccttgtggcgtttgtgggcgcggtggtgggggcgtcgataagctatctggcggctcagggggaaattgagcacgacatcacgctggttccggcgcccacccgcgccacctcgcgacgccggcggggcggcgatccggttgagcgggtgtgcaatgcatcacgcttatcgacgtttccctgccttcaaatctcatcccgcacaccagactccgtcggtcaaactgcgcaacagcgaagactcaatatgcgagtggagttagtccgacaacctcggggttctgtcttgatcatcgacgatgtggtaacaacgggggcaactatttccgcatctgcaaacgttcttcgcgcagcgggtgtgcaggtcagaggagctttaacttattgccaagcgtgatcttggatataaaaggggcc

SEQ ID NO: 1602 - protein, 152 aa, Corynebacterium glutamicum
LSPYDGPHRNVLIALKEHGRADLVAFVGAVVGASISYLAAQGEIEHDITLVPAPTRATSRRRRGGDPVERVCNASRLSTFPCLQISSRTPDSVGQTAQQRRLNMRVELVRQPRGSVLIIDDVVTTGATISASANVLRAAGVQVRGALTYCQA

SEQ ID NO: 1603 - DNA, 693 bp, Corynebacterium glutamicum
  CDS (101)..(670): RXA00134
gcagctgtgctccaccagtgactaaaaacttgtctttcacgtgccccaccttatccgtgttccccacccctgtgcgtaacgacagctagaatctcaagttatggccgttcatttaaccaagatctatacgcgaaccggggacgatggaaccacggggctctcaaattttgagcgagttcccaaggacgatccccgccttattgcatacgccgactccgatgaagcaaactgtgcgattggccaagtgcttgcactcagcagccctacggaagatatggcaaccttattgcggactattcaaaatgaactttttgatgtgggcgcagacttagcaaccccgattgaggagaatccgaagtatcccccacttcgagttcttccggaatatatcgaacgacttgagaaggagtgcgataaatggaacgaggatgtgccggcgttggattccttcattttgccgggtggcacgccagcagcggcactcttgcacaccgcaagggtaattacgaggcgcgcggagagagcagcttggatagcggtgcgggaatttccgagcaccacctctaccttgccagcccaatacctgaatcgtcttagcgatctgctgtttattctttcccgtgttgccaacaatggcaatgatgtgaagtgggttccgggcggaaaaagatgaaaaccaccctgcgaccgtga

SEQ ID NO: 1604 - protein, 190 aa, Corynebacterium glutamicum
MAVHLTKIYTRTGDDGTTGLSNFERVPKDDPRLIAYADSDEANCAIGQVLALSSPTEDMATLLRTIQNELFDVGADLATPIEENPKYPPLRVLPEYIERLEKECDKWNEDVPALDSFILPGGTPAAALLHTARVITRRAERAAWIAVREFPSTTSTLPAQYLNRLSDLLFILSRVANNGNDVKWVPGGKR

SEQ ID NO: 1605 - DNA, 309 bp, Corynebacterium glutamicum
  CDS (101)..(286): RXA00140
ctcaacgatattcagctttccgcaatgctgaaaaacgccatcgatcacgtcctcgcgattcaagatgccgtagccaatgcaggcaaggaaatcggctaacatgtcggacgagtccatcgaagagcaggaaaaagaactcgcggcgctgaaggctcaaatcgatgaactggaaaagaaagacaagcagaacaagctaatcatcgagattttgtccaaggccgtcgaaaagaatgtggcagaggcagaagcgaaaagagcccgcaaatatccgcccaatcccctgtggtgaattctaaggcgtcgaacttt

SEQ ID NO: 1606 - protein, 62 aa, Corynebacterium glutamicum
MSDESIEEQEKELAALKAQIDELEKKDKQNKLIIEILSKAVEKNVAEAEAKRARKYPPNPLW

SEQ ID NO: 1607 - DNA, 585 bp, Corynebacterium glutamicum
  CDS (101)..(562): RXA00141
gtcggctcctacgttatgagctccatcgaatccgctgttcagtgcttcgaatggcttgagcagcaattcccagatctagtcacctggaaggacgaacaccatgaccactgattccaattctgcgacaatcccaaccccaaagccgattccagtgaccatcgaccgaatctccctcatcatgaaagaattcggcattgacctatccatcgccgatgaacaaggcaccggatcccaagtagccagcgccaacctcaacggccatcacgtcatgttcgctgtcatcggttcagtcctgatcgttcgtgccgatcgcgccaccgaaatgccagtctccgacggcaaccccgcatggcatctcgcctgcaaccaagtcaactgtttcaacttcgctgccaaggctgtcgtagttgatcgcaccgacaacatcgtgatccgcgccgagaaggatgtccccatcgccgctgggctcaacgatattcagctttccgcaatgctgaaaaacgccatcgatcacgtcctcgcgattcaagatgccgtagccaatgcaggcaaggaaatcggctaacatgtcggacgagtccatcg

SEQ ID NO: 1608 - protein, 154 aa, Corynebacterium glutamicum
MTTDSNSATIPTPKPIPVTIDRISLIMKEFGIDLSIADEQGTGSQVASANLNGHHVMFAVIGSVLIVRADRATEMPVSDGNPAWHLACNQVNCFNFAAKAVVVDRTDNIVIRAEKDVPIAAGLNDIQLSAMLKNAIDHVLAIQDAVANAGKEIG

SEQ ID NO: 1609 - DNA, 600 bp, Corynebacterium glutamicum
  CDS (101)..(577): RXA00142
atcctcaatttccgccgtaagcgcaacgactaaaaccaccatctgtagtgtggtggaaaagttacttttaaaaggattttggaaggactgaaactccccagtgcctcaatcacccacagcacacgaccccaacgacatccaggaatttaacctcgatgccgttgcagggattctccaggacgaaaaactggactaccgcatcgatgaacacgacggcgaaaaagtaatccgcaccggattcatcaacgccgccatcagcttcatcctcttagacggcagcttaaccatggaagccatgtggcgaggagccccctccaccgatgctgccgcacaagttctcgcggccaccaacgaatggaacctcacccagttcgcacccaccattcgattcttcgaactcaacgaaggcaccctcgccatcaatgcactgcgacacgtcgttgtttccgcaggcatgagccacaaccaagtcggctcctacgttatgagctccatcgaatccgctgttcagtgcttcgaatggcttgagcagcaattcccagatctagtcacctggaaggacgaacaccatgaccactgattccaattctgcgacaatcc

SEQ ID NO: 1610 - protein, 159 aa, Corynebacterium glutamicum
VPQSPTAHDPNDIQEFNLDAVAGILQDEKLDYRIDEHDGEKVIRTGFINAAISFILLDGSLTMEAMWRGAPSTDAAAQVLAATNEWNLTQFAPTIRFFELNEGTLAINALRHVVVSAGMSHNQVGSYVMSSIESAVQCFEWLEQQFPDLVTWKDEHHDH

SEQ ID NO: 1611 - DNA, 897 bp, Corynebacterium glutamicum
  CDS (101)..(874): RXA00150
agctgagcagggatcggcactagcttctactacgataacgagaactttgtttcaatacattcaaaatggcggaatattttgatcacgggggtgcaactgtatggtgttttctatgcatgacaaaggtgagacccaggagaatcctgcggacatgtcaggacgcctaaacacaccaatttccacggtctttcacttctttagctcacttttccatgacgctctgcgcagtgttgcccagtggagtgcgtggaagaaaatcgctgtatcggttgtcatcgtcgcaattatttccgtaacttttcttgtcgatgtccccccgatttcggtttatcgtgactgggcaaacaacgccggcgacgcttttgtcttagttttttgcgccttttatatcctcattactcagttccctatcccccgcacagttctcacactggcctccggcgtgctgttcgggccggttcttggatcagtcgtggcgctgggttccaccacagtgtcagcggtaatctcgctcctcattgttcggggtctgcttggcgattggatggcgccacgtttaacgcaccccgcagtctcacgcatcaatacccgacttgagcaacgtggatggctggcgattacctctttaagaatgatcgccgctatccccttttccatcctcaactatgttgcagccttgactagcgttcctgttttttcttttgccatcgctaccttgatcggatctgcaccaggaaccatcgtcaccgtcgttttgggagatgcagtcacaggttctggaaactggactgccgttgcattcacggtatttttagcgattttgggtgttttaggtatctttttagatcaaaagatgccagtcaagcctggaaagtagacaatataaggtagggttgg

SEQ ID NO: 1612 - protein, 258 aa, Corynebacterium glutamicum
MVFSMHDKGETQENPADMSGRLNTPISTVFHFFSSLFHDALRSVAQWSAWKKIAVSVVIVAIISVTFLVDVPPISVYRDWANNAGDAFVLVFCAFYILITQFPIPRTVLTLASGVLFGPVLGSVVALGSTTVSAVISLLIVRGLLGDWMAPRLTHPAVSRINTRLEQRGWLAITSLRMIAAIPFSILNYVAALTSVPVFSFAIATLIGSAPGTIVTVVLGDAVTGSGNWTAVAFTVFLAILGVLGIFLDQKMPVKPGK

SEQ ID NO: 1613 - DNA, 720 bp, Corynebacterium glutamicum
  CDS (101)..(697): RXA00151
aagtagacaatataaggtagggttggagaagattctttacttcttcactcattcgccctgacagcgaatccactacaataaacaaagggggcagccacccatgtgggcactgcatgccagataccgcggccgagacacacgacgagccgaattggttaaaagatttgcagaagctttgtccaccctcgaaggtgctggccagtttgaagtcattggtgtcgaagacatccgagcacacatcacctcaccgttaaccacatgtgatgttgtcatggcgctactcgcagctggcgattgggcaatcggaattggtgttatccccaccgttgacggaacagtcgatgaatcggatgaggccatcatcgaacaggtaaagaaaatttcctctgatgctctgcgccccaccgccaaggcgggaacggtcaaagttaggatcgccggaaccaaacgggacaatactcaagccttcaacatctccgctgcattcacgttgattgggcaagttctgtcaaagcgcaccatcgaaggacgcgaagccaccgcactcgtccgttctggactgaatcaaaatgaggcagcccaagagctcggtatttccaagcaggcaatgtcgcagcgattgcaggcggcaggttggcaggcggaatctgctggttggcaattggccgtaaacctcatcgagcaggctggcaagcgctagcaggcgatttaagagcctga

SEQ ID NO: 1614 - protein, 199 aa, Corynebacterium glutamicum
MWALHARYRGRDTRRAELVKRFAEALSTLEGAGQFEVIGVEDIRAHITSPLTTCDVVMALLAAGDWAIGIGVIPTVDGTVDESDEAIIEQVKKISSDALRPTAKAGTVKVRIAGTKRDNTQAFNISAAFTLIGQVLSKRTIEGREATALVRSGLNQNEAAQELGISKQAMSQRLQAAGWQAESAGWQLAVNLIEQAGKR

SEQ ID NO: 1615 - DNA, 549 bp, Corynebacterium glutamicum
  CDS (101)..(526): RXA00153
cctcgatttgagtaaagaggacgtcctcgcctgatttttcgggtgtgtttttgcgtggcgagccctgcctggcccttccaaattatgtagggtggcctgcgtgggagcaataatttggtttatcggagcattggttcttgctggcttggaattggcagtaggtgagttcaccttattgatgctcggcggtgcagctttggcaaccgccggcgtggcactcatcggtgtcccagtatgggctgaatttgtcaccttcgcggtggcctcagctgctctactgatgttcattaggccggccattagaaagcgtctgctgaaaccaaaggttctggactcttcaccacgagcacttgttggccaccgtgctgaagtgctcgaagatgtcggagcgaccagcgggcaggtccgcctggatggttcaatttggtccgcccgcagcatggatcccacacacaccttcgcggaaggtgaaattgtcagtgtcattgatatccaaggcacgaccgcgattgtatggaaagaagcctaaatttttaacaatcaaatagt

SEQ ID NO: 1616 - protein, 142 aa, Corynebacterium glutamicum
VGAIIWFIGALVLAGLELAVGEFTLLMLGGAALATAGVALIGVPVWAEFVTFAVASAALLMFIRPAIRKRLLKPKVLDSSPRALVGHRAEVLEDVGATSGQVRLDGSIWSARSMDPTHTFAEGEIVSVIDIQGTTAIVWKEA

SEQ ID NO: 1617 - DNA, 906 bp, Corynebacterium glutamicum
  CDS (101)..(883): RXA00155
gttgcgggagtgtccaccaaaaatattgcctgcataggggtctgaaaaactcatagctcaccaccctagtcaaagcactgcactacacttccctaacactatggaaattcgagcaaacgtttattcaccgcttcaaaatactgccgtctggctaggtgcgtggctctatgaattagtgcccaccgaagatgtcatcgatgcgttcgtcgatctcggcggcccgcacaccttcggcgacggcgggctgctcgatatgctgcgaactttaaaagaattaacaagcacgcttatcgacgcccccttccacggtccgattttaactctcgcactcagcggcccaggccaagtgccggcgttgccggcaggttcacgcgctgcggtcttggcctccgcctcgaaggagggggcgttggtgctgggcggcgtcgataagcagcattcttgggcgcttattcctacgcgcggtaaggatgccactgagtggaatttggtggaggtggagggctttttgccggcgattgcgactgtctcgcccggtgaggcggatcagctgctccgtcaggcgacagatcaggcggcaaatatcattgagttaagtggctacgcttcacttgcgccgaaatctttgaagaatccgcgactaaccgtgggcatgctgtcagatttttacgacaccccggggcttccctatgcagtcccagagaggtcggcgaagctttttgcgcgcgcagatcgcgtggctgccatcgcagagaccgtgcaggaaaccatcggcgatcacagcctggatccacagttgattttcctgtggagccatattcggaccgcgcgcatggctggggtgagttatgccctcgcagagtttgcgagggactatcactcctagttggcagctggcgccgctga

SEQ ID NO: 1618 - protein, 261 aa, Corynebacterium glutamicum
MEIRANVYSPLQNTAVWLGAWLYELVPTEDVIDAFVDLGGPHTFGDGGLLDMLRTLKELTSTLIDAPFHGPILTLALSGPGQVPALPAGSRAAVLASASKEGALVLGGVDKQHSWALIPTRGKDATEWNLVEVEGFLPAIATVSPGEADQLLRQATDQAANIIELSGYASLAPKSLKNPRLTVGMLSDFYDTPGLPYAVPERSAKLFARADRVAAIAETVQETIGDHSLDPQLIFLWSHIRTARMAGVSYALAEFARDYHS

SEQ ID NO: 1619 - DNA, 1305 bp, Corynebacterium glutamicum
  CDS (101)..(1282): RXA00159
cttagggggtaaccccacccctgtacaagttttcgtgctaccaaacacgccgtgctaggggtgtcgcatggtgcaatgatccccgctaacctgggattccatggagaatgttagttccgtcacgtcggatggttcggtagcggatgtgcatgccgaacggtggcaagaattgctcgcacgtttggatgccgatgcgccggatattgcggagggcaccgccgcaaagttgctcgctacgatcccgggctatgagctcgttgacgcggggccgatcagggagtcgtcgatacgcaatacggccttgattattcgcgtgattaacgcgggcaccgagccaaaggccgaggacttgcctgaggctttaaggcttgccgacgaacgtatagcgcaaaatgtgccgctgggaagtgtgctgcacggttttcggatgtctctgggggaaattctggagcatttggtgcagttgggcccggaatacaatattgatcccggcagaatgctgcgctggtccacactgatgtgggcggtcaatgatgccttttctacgcgtgccacaagggtgtaccgcgatcacgaggtcgccacggcgatcgccgattcggtgcgaaggtcagaatggatcggcaaagcggtctcggaaggctctgaactgtcagagcttttatggggtgctgcgatgtatgacgttcccgccgacactcctctaagagcattggcagccacctcacctgatcatgcgaaagctgaaacacagatccagaagtggactcagcgcgccggagtgcgggtgctggcatcggtgcagccaagcgtgatcgtggggatcgtgattggggagccgaagcgaaacgtggacggccctggttttgctgtgggtttgggtagggcagaggtgctctcaaagctggcggactcatataaggatgcatcccttgtattgaaggctgccgataatctgaaacttaatgaggtgcagcgggcacaagatttgtcatggaagttggctatccatgcaagcccacgggtgacggagattcttgcgcagaaatatgtgaagccactaagggaatctggcgagtttgctcatgagatcgtggaatctttgcgggcatatgtggacaaccagatgaatattcctgctgctgcgcgcagtattcctgtgcatgtgaatacgcttcgctatcggttgcgccggtttgaggagttaacgggctgctatttggaggatacatccacggtcattgaagtgtcgtgggtgctggaagtctttggccgggagctgtagaaaattgcacctatatatat

SEQ ID NO: 1620 - protein, 394 aa, Corynebacterium glutamicum
MENVSSVTSDGSVADVHAERWQELLARLDADAPDIAEGTAAKLLATIPGYELVDAGPIRESSIRNTALIIRVINAGTEPKAEDLPEALRLADERIAQNVPLGSVLHGFRMSLGEILEHLVQLGPEYNIDPGRMLRWSTLMWAVNDAFSTRATRVYRDHEVATAIADSVRRSEWIGKAVSEGSELSELLWGAAMYDVPADTPLRALAATSPDHAKAETQIQKWTQRAGVRVLASVQPSVIVGIVIGEPKRNVDGPGFAVGLGRAEVLSKLADSYKDASLVLKAADNLKLNEVQRAQDLSWKLAIHASPRVTEILAQKYVKPLRESGEFAHEIVESLRAYVDNQMNIPAAARSIPVHVNTLRYRLRRFEELTGCYLEDTSTVIEVSWVLEVFGREL

SEQ ID NO: 1621 - DNA, 585 bp, Corynebacterium glutamicum
  CDS (101)..(562): RXA00161
ttactatacatggtgtagtcccaaattaactaatgcgggtgaccaactgcaccgtaaaaaaaattcgcttatcgtaaatcagcaggtagaataacactctatgagcgagccagggccatccggggttaaagaaaagaagaaagtaaaggcaagtcacattgtctttcttctcatttgttttatcgcagcctgcgcgttggcgtggtggcagtggtcaagattccagtccgggtctggaactttccaaaaccttggctatgccttccagtggcctcttatcggagcattctttgtttatgcctaccgcaagtatttgcagtatgagaatgagtccattgagttagaaaacatggaagccaaaatgatggcggagcaaggcaaaacaccagttgcgcaatcagagcaggaagatagcttcgttcagctctctcaccgtccgagcctggtggaagatgacagcgtcaaggaaatcgacgaatccttcctgccgtctcgcccgacgatggatgtggaagagttcaacaggttgaatgatccgcatgcacggagacgtcgaaaagcataaacctggaacttttccgggcc

SEQ ID NO: 1622 - protein, 154 aa, Corynebacterium glutamicum
MSEPGPSGVKEKKKVKASHIVFLLICFIAACALAWWQWSRFQSGSGTFQNLGYAFQWPLIGAFFVYAYRKYLQYENESIELENMEAKMMAEQGKTPVAQSEQEDSFVQLSHRPSLVEDDSVKEIDESFLPSRPTMDVEEFNRLNDPHARRRRKA

SEQ ID NO: 1623 - DNA, 2196 bp, Corynebacterium glutamicum
  CDS (101)..(2173): RXA00169
tttgctgtgtctaagtgtgtggggtaattgtaatataattggtagaattttctctaattaatattttattaacttacggagaaagtttatgataaatatgatgtcgttgggtaatccagcagcaatgctcgctgcgtacaacaccagcacgcaggtggcaccgcagccacagctgggaccacgtgctggagaagttcaactcagtagcgaacagcaagccatgattgattatgtacttgctggcaaagatgtcattgttgatgccaccgtaggctcgggcaaaactaccgctattcaacgactgtgttcgatcatgggtgcagaccatgacgtgctgtatttgacgtattcgaagttgttgaaggtcgatgcacagcagcgcgttcgtggcgccaaggtgcagaactatcacggcattgtctatccgcatctactcaaggccggcatcaagtgtggtattagcgagtcgattcgggagtttaacaagaacttcaaacacatttctcgcacgttccccagttacgacctgctggttattgatgagtaccaggacatcaatgaggactatgcagaactgctgcgcaacattaagtctgtgaatccgcttatgcagattgtcatggtgggtgatttggaacaaaaagtccggtctgacaccacgttagatccacaagaatttgcagcacaattgtgtgaagatccagtcttcgcgccgtttacacagtcgtttcgaattggcgaggctatggcagcgggtttggctgatgcctggaataaaccgattgtgggtgccaataccgcacagcagattgaatataggtctttcgctgaggcagtggtgttgatccaaagcaccgagccgagcaaactgttgtgtttgggtagccgcaatgggcagatgtcagatgcgcttaatgtcgtggagaggaagtcgccggcaaagttcaataagaaaactgtgttcgcctctattcgcgatggtgattcccagattgcacaccctaatgacgctgcggtgtttaccacctttgattccagtaaaggtctagagcgcgatacctgcgtggtctttgactatgacgaagaattctgggacatgcgtcttggttaccccaatgttgatccagtggtcatgcgcaatgtgtttttggtggcagcatcacgcggtaaaaacaaggttgtttttgtacgtagcgattctcttcaagcagcgtatgaggctggtgcggactgggctgcagggctcgctgtgggtgtggtggacaacaatactgaggttgcacctgaggtagatgcccatacgccggcagaagaaagtaagggtgatgtgggtgaggttcagtcacagattgagcgcatgatgggttttatccctgtttcagtgtttaaagaactacctgagttggcgccgagcgaatatgcgcgaccgatctctgtgactgaagcctttgattttaagtacgcagagaatgtcgaagcatgttttgacctgcttgatgtcaagcgtctcgacaacggcaagggtgcagccattgaggtcaatcgcagtgacgggcttattgatctctcacccacagtgggaaactttcaggaagcagtgttcttcaaggactacaacgttcatacagcactatcggcgtacccgagtcagttcgcgaaaaatcttaaacgtttggtgaagaaaaacaatagcgtatggcgtaactgccttattgtcacagcagcgtccacagagcagatgcggtatgtcgatcaggtgcgcagctctatcccggttgctgcggagaaggcattggtctcacggctgagtacgaggctgaatgctgattcacgtaatcagattccactgatccttgacggcgaggcagtacagagcaaagtagtgcgcacgccaatgtcttttgcaggtgtcgcagatgcggtgcacaagggtgtgctttatgaattgaaattcgtctctgagttgacacatccgatgtttttgcagctcgcaatgtatttggtcatgtctgggatgaaggacggtattttgtggaacacccggacagatgaggcgtggcaggtgcgtgttcctgacccgaagcgttttcttaatgctgtggtgttgtgtgtctccaagcaggattaccgggtcggtaactttgatctgccgagcactggtggaggtgcgcgctaaatggtgttgatgtgtggggt

SEQ ID NO: 1624 - protein, 691 aa, Corynebacterium glutamicum
MSLGNPAAMLAAYNTSTQVAPQPQLGPRAGEVQLSSEQQAMIDYVLAGKDVIVDATVGSGKTTAIQRLCSIMGADHDVLYLTYSKLLKVDAQQRVRGAKVQNYHGIVYPHLLKAGIKCGISESIREFNKNFKHISRTFPSYDLLVIDEYQDINEDYAELLRNIKSVNPLMQIVMVGDLEQKVRSDTTLDPQEFAAQLCEDPVFAPFTQSFRIGEAMAAGLADAWNKPIVGANTAQQIEYRSFAEAVVLIQSTEPSKLLCLGSRNGQMSDALNVVERKSPAKFNKKTVFASIRDGDSQIAHPNDAAVFTTFDSSKGLERDTCVVFDYDEEFWDMRLGYPNVDPVVMRNVFLVAASRGKNKVVFVRSDSLQAAYEAGADWAAGLAVGVVDNNTEVAPEVDAHTPAEESKGDVGEVQSQIERMMGFIPVSVFKELPELAPSEYARPISVTEAFDFKYAENVEACFDLLDVKRLDNGKGAAIEVNRSDGLIDLSPTVGNFQEAVFFKDYNVHTALSAYPSQFAKNLKRLVKKNNSVWRNCLIVTAASTEQMRYVDQVRSSIPVAAEKALVSRLSTRLNADSRNQIPLILDGEAVQSKVVRTPMSFAGVADAVHKGVLYELKFVSELTHPMFLQLAMYLVMSGMKDGILWNTRTDEAWQVRVPDPKRFLNAVVLCVSKQDYRVGNFDLPSTGGGAR

SEQ ID NO: 1625 - DNA, 1977 bp, Corynebacterium glutamicum
  CDS (101)..(1954): RXA00170
taactaattctttacctatcctcagtttgtacatattttccgacaggtaaaggtttgatataagcggttggtacgaagactagtgggtgtttctgctgtcatgttgctggccatcggggttgcatctccggtagctcaagcacaagtggaagatcaatttgagcttgtaaaagaaatcagtgatgagcagtttgctgatgatggtgttgactatgttcccaataggaatgctccgactgttaaggaacaacttgaggatttcgaatcagcacatccagaagtagtcattgagtatcacgagcacgtcaacgatagtaaagacaatgttgaggaacttccgctacctaagcgggacatcgttgcaggggaaatgcgctcagatgtcatcgagttaccggagggggtgagcaaggacgaagctgatcaggtggaggttgcggaagcgcgacttaatgagggcgcacgattgatggctgcaactgggtgtgaggctatgtggccaacaggtttctcagtttgtggccggattcttgacgcttatcggcaggttggaggtcagttgtcatggcttgggccaccaaagtcaaacgagttgaccaatcccgacggtgttggcaaaagaagtgaatttgttgggggtgccatctattggcatccagacacaggcgcttatgcagtgaccctggacggtttgaggcagtgggggaccttgaactgggaatcagggccattggggtacccaacctctggtccgatggatacaaactatccccttactcagcgacagacttttcaaggtggtgacaactattacaacccattgactggcggtgctgtgtggggcgatattaaacagcgctacgaagaacttggcggctcgaatcatgccattggcatcccgatcactaatgagctacctagcggtactgagtatttttacaataatttcttcaatggaacaatttcgtggcgaaatgatcgtcagacacggtttatgtatttggctacgcagcgggtgtgggatgcgttgggtcgggagacgggtcgtttaggttttcctgaagcagatgaaacacctgaggtttctggtctattccatgtggtgaattttgcggagcgcggggtgattgcgtggaatggaatcctaggcgccagagagctgtatggtgatgtttactccctgtggctgcaataccaaaataccgatactcctttagggtggccgataccatcattgacatcattaaatgagtcactcgaacaagaattcaccagaggtgttgttttaggctcaggtgatgcactgacatggattcctgacgatgaagaaagaagtttggaggatttcctcccaattggaagtagcggctcatcctcatcgagccaagagatgaccctgttttcccagcgtgcacaatacgtggattgcaagaatcttcccgatttagatgagcagagaaaaactgaaaacaacattgaaaagaatggtggcccgatcaaaaaagagtatagttcgcgaggtttccccaccgagttcagatttgtcgtgagaaaagggcattatgaccgttacaggaatgaaggctggggatatttaaaaaactattgcaaacacaacttcgccaaccacgctatggctgaggccgtagtagataaagcggtgattgattatggctcatcgccaggaaccagctattacaagttcgagaaaacggtgtactttctagattgcagaacttatacattcaataagaactcaggatgtaaagaaatgcacgctccgcaatgggtgactattatttacaatcctcatactttcactggagcaaattcgaacagacccaagggggtaatttcagcatggtgtaattcaaccccacctggtggaatcgaacacgagcctgaaatttcccaatgtcctgatcatgtgaatctttataataagcttcgcatatgacagaaccccatcaactgtgc

SEQ ID NO: 1626 - protein, 618 aa, Corynebacterium glutamicum
MLLAIGVASPVAQAQVEDQFELVKEISDEQFADDGVDYVPNRNAPTVKEQLEDFESAHPEVVIEYHEHVNDSKDNVEELPLPKRDIVAGEMRSDVIELPEGVSKDEADQVEVAEARLNEGARLMAATGCEAMWPTGFSVCGRILDAYRQVGGQLSWLGPPKSNELTNPDGVGKRSEFVGGAIYWHPDTGAYAVTLDGLRQWGTLNWESGPLGYPTSGPMDTNYPLTQRQTFQGGDNYYNPLTGGAVWGDIKQRYEELGGSNHAIGIPITNELPSGTEYFYNNFFNGTISWRNDRQTRFMYLATQRVWDALGRETGRLGFPEADETPEVSGLFHVVNFAERGVIAWNGILGARELYGDVYSLWLQYQNTDTPLGWPIPSLTSLNESLEQEFTRGVVLGSGDALTWIPDDEERSLEDFLPIGSSGSSSSSQEMTLFSQRAQYVDCKNLPDLDEQRKTENNIEKNGGPIKKEYSSRGFPTEFRFVVRKGHYDRYRNEGWGYLKNYCKHNFANHAMAEAVVDKAVIDYGSSPGTSYYKFEKTVYFLDCRTYTFNKNSGCKEMHAPQWVTIIYNPHTFTGANSNRPKGVISAWCNSTPPGGIEHEPEISQCPDHVNLYNKLRI

SEQ ID NO: 1627 - DNA, 456 bp, Corynebacterium glutamicum
  CDS (101)..(433): RXA00173
tgccctgatccacacacaactgtgaagaaagaagccgcaatgtccaccacatccacctatgagagccgtaaggcagctattcgcgacgctattctcgcctatgtcaacaacaatcaaggctgctgcaccctacagccttcatgcccatgatctcgaacagcttgctgtagatctcactttagttaccacctttgatagcaatgctgcagttgatgtcacgccaacacatacagaagcacctggttttaccctgcatgagggcaccgatactgcgcctatggctccaaccctggtcgtacctatttccagcgacatctccacagccgtttcggaaatatctacattagtgcagcaggctcgcaccgacgcagcaagcgccattcatgaagcagaagctgaattttacaaccaacttgctgcggtccttgctcagtgatttaatgtggccgacacacc

SEQ ID NO: 1628 - protein, 111 aa, Corynebacterium glutamicum
MSTTIKAAAPYSLHAHDLEQLAVDLTLVTTFDSNAAVDVTPTHTEAPGFTLHEGTDTAPMAPTLVVPISSDISTAVSEISTLVQQARTDAASAIHEAEAEFYNQLAAVLAQ

SEQ ID NO: 1629 - DNA, 408 bp, Corynebacterium glutamicum
  CDS (101)..(385): RXA00174
gcggtgtggctgttaccaacaatcccgatggcactgaacaaggtgatgcacgccgctgggtaagccactgggaatcataaaaaagaaagtagcactagctatgcctaatcacccacctatttccaccttcgatgaccgtcgctctgctatgcgcgaaggcattactgattaccttgccaatacaaatgcaaatgggttaggcggttacagcatcagcgacacccacctcgacaatcttgctgagaaattcacccgcacacatggtgaagcacagtacgatgccggctttgatcccaatgatcttgaaccagagacttttgttcgtgacattgagatgagctgggatgagcgtgctattgatcgtgccctgatccacacacaactgtgaagaaagaagccgcaatgtcc

SEQ ID NO: 1630 - protein, 95 aa, Corynebacterium glutamicum
MPNHPPISTFDDRRSAMREGITDYLANTNANGLGGYSISDTHLDNLAEKFTRTHGEAQYDAGFDPNDLEPETFVRDIEMSWDERAIDRALIHTQL

SEQ ID NO: 1631 - DNA, 753 bp, Corynebacterium glutamicum
  CDS (101)..(730): RXA00175
agctcgacagccgtaaagaagttgtaggtctttttcgcttgggatactgatgctctcccaagcgaacatgggcgggagcccatgtcggggtgttgtgcgaatggctgtgtgtcaactacctcagcctgagaaaacaacacttataaagaaagaccttttactcatgacttctacaactaactccaccgccatgttcaacgaccaccttatccctatggcagagcttgatgaacaagctctgcgcgacagcgttggttcttgggcacagtacaagcacccgcttgaccagcgcaaagaaccagagctcgtccttattcgtcgcgtcaacagctcagagcgtgtgtgggtcttaagtttcactgacctgcgtgctgatgcaggtcttgtgcctcgtagcacaccgaatgctgacccctccaatatccgcaataccattttctctgtcgctgtccgcgatcttgtccttgatcgctcacttccccggctgcttaacctcaacgggcaaccaccagcaggtgaatgggaagaaggctttgtctacgtcgattatgaccagagcgacaccgtagatggctacctcattgagcacagcgaacctgtctccattgaaagtcaaaccaccggtgaaatgcactatttcgataaggtgccaggcggtgtggctgttaccaacaatcccgatggcactgaacaaggtgatgcacgccgctgggtaagccactgggaatcataaaaaagaaagtagcactagct

SEQ ID NO: 1632 - protein, 210 aa, Corynebacterium glutamicum
MAVCQLPQPEKTTLIKKDLLLMTSTTNSTAMFNDHLIPMAELDEQALRDSVGSWAQYKHPLDQRKEPELVLIRRVNSSERVWVLSFTDLRADAGLVPRSTPNADPSNIRNTIFSVAVRDLVLDRSLPRLLNLNGQPPAGEWEEGFVYVDYDQSDTVDGYLIEHSEPVSIESQTTGEMHYFDKVPGGVAVTNNPDGTEQGDARRWVSHWES

SEQ ID NO: 1633 - DNA, 582 bp, Corynebacterium glutamicum
  CDS (101)..(559): RXA00179
gcgggttcgccaaaccttggtgatctcgttagtgtatgtatcaagcattttctttttgcccaaccataattgaaaggtccaccagcccgtgaccaccatcatgatcgctattcacgctattgcagcaatcctgttcctaggaccagcaacagtagctaactctcagttccacgtccgcgcgtacgatgcacacaacggcaacacccaagccgctggctccgcaaaaacccttttcaagatttcccagtcctacggcatgctgtccctgctcgtgcctttgctgggtatcgccatcatgcttctcgattggtctttctacaagtctgaaggccagttccacgcagcaatcgctctcagtgttatcacctgggcgctgcttctcttcgttatcttcccacgccagaagaagatgatgggtgctcttgaccttctggaggacgatgagcaggctgcaaagacttacgagatcgaaaactgggacaaggcgaagagccagctgtccatgttcggcggcatctgggctctgctgtgggtcatcatcgctgtgctgatgttcatctaacacatctcaaattgccaaaa

SEQ ID NO: 1634 - protein, 153 aa, Corynebacterium glutamicum
MIAIHAIAAILFLGPATVANSQFHVRAYDAHNGNTQAAGSAKTLFKISQSYGMLSLLVPLLGIAIMLLDWSFYKSEGQFHAAIALSVITWALLLFVIFPRQKKMMGALDLLEDDEQAAKTYEIENWDKAKSQLSMFGGIWALLWVIIAVLMFI

SEQ ID NO: 1635 - DNA, 663 bp, Corynebacterium glutamicum
  CDS (101)..(640): RXA00180
aaacgaggatgttgatttcgctgacgcagctcagaagctttcgaaagaaagttaagccttagagggaaccaaacgccaaggcgatgagtctaacccgagtatgaagaactttattcgggtactcatcgcctttagtgttttcctctgtatatataccgttgctccccacattggccgaggtcctggagacctcgcaccagttacagcaatcccccaacgagccacagtcctaggctatgacagagcctccatgtttggcggatggttgggtggcgtgcgggaaggcatcgtggatgaagccggcgacactgatccatactccgggaatcgattagacctctctagtgccgaggtggatcatattctcccgctcagcgccgcctgggatctaggcgcacaccggtggagcgctggcgagagaatcagctttgccaacgaccccctcaacctcgtgctcgtctcaaaagctgagaaccaagaaaaatccgatcaacttcccagcgagtggctcccctctgatcgaagtgcacgatgttggtacgtggaacgccttttcgccgtggccaacgcatacgaacttccgttaccagaaaacgacattcgggttggacgaaaacagtgcgggttcgccaaaccttggtgatctcgttagtgtatgtatca

SEQ ID NO: 1636 - protein, 180 aa, Corynebacterium glutamicum
MKNFIRVLIAFSVFLCIYTVAPHIGRGPGDLAPVTAIPQRATVLGYDRASMFGGWLGGVREGIVDEAGDTDPYSGNRLDLSSAEVDHILPLSAAWDLGAHRWSAGERISFANDPLNLVLVSKAENQEKSDQLPSEWLPSDRSARCWYVERLFAVANAYELPLPENDIRVGRKQCGFAKPW

SEQ ID NO: 1637 - DNA, 975 bp, Corynebacterium glutamicum
  CDS (101)..(952): RXA00183
ctggccagcgccatcgtgggcgagggcgaaggctggatcaccgaactcaacccagaagaattggctatgctgatgagttaccgcgaaaaggagggtgcagatgactgaatcacgccgcgtgaaaatggataacgttatttacgccaattttggcagcaaacagcgcgtatctactcctgatgaccgcacccaggtgattaataaatcacgacacaaacaattcagcccagcgggtactcgtaccgtgatgttgacggagaaaaacgccgacagcggacgacggtcccgcggtgagcagtactaccgaaacggcaatgtcaccggcatgactgtgctggaaggccgcgtggaatgcactgtcgcgggctcccaaaacgagccgtttgttaccacagtgaccttcccataccgaagctcggaaaaactccgcgaagcctacgcagctattgcggatactcccaatggcctgcggcttgtgcgtgatggccatctgacctcctccatgctggatcacttggtgggaagtcctgatgagtcgatttattttgactgcacctgccccgaccgatcgcttgtgtgtaaacatgccgttgccagcgcgtatcacgttgccgagaagatgaccgcgaaccccggtctgatcttggatattcgtggtcaagggatggctggattagaagcactgattcggacctatcacaccaaggttgaaactgaacctgaagacaatgacagtttttggaacggcagggaacttcctgctttgcctgatccaaagattgcccctgctatcgacgattccgatatcaactacctccacaaggctttaaggatggtctcatacacctccctggagcagcttcgtgcggtcagtgatattgaagatatgtacgagattttggtagccaaccaccctgataaccagcaagtgtatgaggaagaagacactgattaaccagggcttatggttgtggt

SEQ ID NO: 1638 - protein, 284 aa, Corynebacterium glutamicum
MTESRRVKMDNVIYANFGSKQRVSTPDDRTQVINKSRHKQFSPAGTRTVMLTEKNADSGRRSRGEQYYRNGNVTGMTVLEGRVECTVAGSQNEPFVTTVTFPYRSSEKLREAYAAIADTPNGLRLVRDGHLTSSMLDHLVGSPDESIYFDCTCPDRSLVCKHAVASAYHVAEKMTANPGLILDIRGQGMAGLEALIRTYHTKVETEPEDNDSFWNGRELPALPDPKIAPAIDDSDINYLHKALRMVSYTSLEQLRAVSDIEDMYEILVANHPDNQQVYEEEDTD

SEQ ID NO: 1639 - DNA, 2751 bp, Corynebacterium glutamicum
  CDS (101)..(2728): RXA00185
attgcgagagctcgctgactctgtggtcaatggtgcagcgccggaagaagaccgcgatgcgctcaacctattgttccgactaagccgggaggtctaagacatgcgtattcatgaaatcatcattgacaatttccgagccatcgaacatctagaacttcgtgacattcctgaccagggcgttatcgtgatccacggtgacaatgagcaaggcaaatcttcaatccttgaagccataaaaacagttctgaatagtaaacacagaaccaccagcaagacgatcaaggccattcagcctgttgaccgtgatgttcccatcagcatcaccctcgaggcaaccgtaggcacggttcgattccgcatacacaaacgcttcctaaaatccacagccgcagaactgcaagtcatcgagccacgtccatccaaccaccgtggactagaagccgaagctgcactggcagaaatactggaaagccatttggacacctctttgcttgacgcattgtttatgaaacagggtgaagtagaagcaggtatcagcgctgtaggaattcctaccctgaccagcgctttgaacgctcaaaatggcaataccgaagatgccaccgaagacaccgcactcatggaggctgtagaaaaggaatacctaaagttctacaccaactccggaaaggcgaatacgaggttcctacagttttccaaacaggtggaaacccttcgtactgatttggatgaggctaacgctgaagtagcaaagctctcctcccatgttgaccgagttaaacgattggaaattgatcgggatcaggccacagcacagttacccaaggcagaggaagaactcgcagggaggaaagcagaactggaggaagcccaaaaggttaaggctcaagccacggaaatccttgcgcagttttcccgggcggaagaacagttagagcaggcaacaggagctcagaaacgacgtaaagaactccgcaataagctggaattagcacagacagaagtcgaaaaggctgaagcagggcaagagaacctggcgcaagaagcttcccgtgaagcagaagaattcctagccttaagtgaaaagttcgaggcagcgcgcgcagctgaaactctggccgttgaaaaggtgaaagcagcacgtcaatcggttgctggaatcaaaaaccgtgaccgtaaagaacacctcacggttatgcttggtgaacttgatcgaattgggcagcgcctctacgaattgcgcagcgtccagcactcatcggtgcgtgtgagccagcgtgatattgatgctctgcaaaaggcgatcaccgaggtcgatatccaaaggacgctcgttgaagcgcagcagggaagtattaccctcagtgcttccacacccaccgacattcaactaggtgatgacaccgtttcagctaccgacgctggaaccacagttgccctcgaccgagaactcaccgtcgtggtcggcgatgtcaccttggtgattaacccaggaaaaacagcagcggaaagtcgcaccgattttgaatccgccgaggcagcattggcggagctgcttgatcaactcgacgtctcagacttggaccagctcagggaacgtttcactgcccaagagcaacgagacgcggatattgcagaactggttcgcgaacaacagcgcatgagcggtgggacagaaacaacagttttacgtgccgagctagaaggcctgcacgtcccagaggatctagacccatcaatttctgtggatgatgcgcaaactcagttgaatgaggcagaagagtccagagagctcgctgcggaggcgcataaacacgcaaatgcagcacttgatggattgcgttcgcgtcccgtagataaagctctgacagttttcaacgctcagctcgcagcactgcagagaaacctctcttccgcacaagttgaattagaccgtgcagtggcagaaacctcggatgacgaagttgatgctgctgtacagcggtgcgctgaagctctagctggggtgcgggtacagaagcaggagattgaacaggtcttggcaaaaaccaacccagacatggctcaacgcttatgtgatgctgctgaagcaaatgtgcgatcgtataaaacggcagtgtctgatgccaccacagagttggtgcgcctggaaggcctcatcggtgtagctgcaggtgcgaaagaacgactagataaagttaagtctgcgctgacagcagctgaaaaccggtttgaatcagaacaacgtcgcgcccacgctgcacgtcgcctctatgccctcatggtgttctaccgtgatgaatcccgaaagcgctacgcagcacccttcgcggacaaactatccaggctggcagcatccgtatttggagaatcagcagactttgatcttgatgatgagctgaagatctccagtcgttccataggaccacgaacagtggaccttgccaatctttctggcggcgcaaaggaacagctggcaatcctcacccgctttgctatcgcagaattggtagcagaatcctccgcgcaaggtgctgtgcctgtgtttattgatgatgcattggggagcacagacccagagcgactgacccgcatatctactctgtttagtgatgcaggcaaggactctcaggtgtttgttctcacctgtgttccagaccggtacaactatgtagaggtcacccaaaagcacagcatcgagtcattgaaaactgccaacgctctgctgtagctgagcaaaaagccaagcaa

SEQ ID NO: 1640 - protein, 876 aa, Corynebacterium glutamicum
MRIHEIIIDNFRAIEHLELRDIPDQGVIVIHGDNEQGKSSILEAIKTVLNSKHRTTSKTIKAIQPVDRDVPISITLEATVGTVRFRIHKRFLKSTAAELQVIEPRPSNHRGLEAEAALAEILESHLDTSLLDALFMKQGEVEAGISAVGIPTLTSALNAQNGNTEDATEDTALMEAVEKEYLKFYTNSGKANTRFLQFSKQVETLRTDLDEANAEVAKLSSHVDRVKRLEIDRDQATAQLPKAEEELAGRKAELEEAQKVKAQATEILAQFSRAEEQLEQATGAQKRRKELRNKLELAQTEVEKAEAGQENLAQEASREAEEFLALSEKFEAARAAETLAVEKVKAARQSVAGIKNRDRKEHLTVMLGELDRIGQRLYELRSVQHSSVRVSQRDIDALQKAITEVDIQRTLVEAQQGSITLSASTPTDIQLGDDTVSATDAGTTVALDRELTVVVGDVTLVINPGKTAAESRTDFESAEAALAELLDQLDVSDLDQLRERFTAQEQRDADIAELVREQQRMSGGTETTVLRAELEGLHVPEDLDPSISVDDAQTQLNEAEESRELAAEAHKHANAALDGLRSRPVDKALTVFNAQLAALQRNLSSAQVELDRAVAETSDDEVDAAVQRCAEALAGVRVQKQEIEQVLAKTNPDMAQRLCDAAEANVRSYKTAVSDATTELVRLEGLIGVAAGAKERLDKVKSALTAAENRFESEQRRAHAARRLYALMVFYRDESRKRYAAPFADKLSRLAASVFGESADFDLDDELKISSRSIGPRTVDLANLSGGAKEQLAILTRFAIAELVAESSAQGAVPVFIDDALGSTDPERLTRISTLFSDAGKDSQVFVLTCVPDRYNYVEVTQKHSIESLKTANALL

SEQ ID NO: 1641 - DNA, 1542 bp, Corynebacterium glutamicum
  CDS (101)..(1519): RXA00199
acccagcaccattttttgtggtttgctctaagttatgggcgaatcagtaagtactgacaggtacactccgcagcagcgcacgcgttatcgccagctgctcatggaagatcttgagatttttgatcggcatttgcagcattccgattttgaggatcagggttccatcggcctcgagttggaactcaacctcgtggataagcatatgcaacctgctttggcaggccacgcggtgctttcccatttagacgatgagtaccagtcggagatcggtaactttaatgttgaaatgaaccacccgccactatccgttaaaggcgatgctttacgacgcctcgagcaaggcatcacctcgcgtctaggtcgcgtgcgcgcggccgccacatcggagaacgtgaacgtggcgatgatcggcacgctgcccaccatcaccccagaattcctcgaagatccggcatggatgacccaagaaaaccgctaccgtgcgctgagcaatgcggtgatggaatcgcgtggcgagttagtgcacatcaacatcgccgaccgtgaacaaatcatccacgatttcactgatctcgcccccgaatcaacttgcacgtctattcagttgcacctgcaattagcacccaataagtttgctgcagcgtggaatgcgtcgcaagcaatagctggtgttcaagcagctctttccgccaactccccacttttcctaggccgtcgggtgtggcatgaaagccgcattccagtgtttcaacaagctatcgatacgcgtactcctgaacttgtgaatcaaggagtccgccccagagtatggttcggcgaacgatggatcaccagtgtttttgatcttttcgaagaaaacgtacgctacttctcccctctcatcgcagaatcccgcgccctgtctggcacaccaatgatgaagggaaaatcccccgcactccactacctcaatctccacaacggaacggtgtggcgctggaaccgacccatttacgcaccgggggaagagcgctctcatctgcgtttggaaaaccgtctcctacctgcaggtcccacccccatcgacatcaccgccgatgccgctttctactacggtttggttaaatatctggccgaggaaaaccgccctgtctggtcacgtctcctattccctgatgcggaaaagaacttccaatccggtgcacgttcagggctgttcgcccgcatgacctggccaaccctcggacaagtcaacgttgcgaatctggtccaagagcacctcatccctcaagccagaatcggactggaacgactcgaagtaaacaaagaccttatcgaccaatacctgggcatcatcaccgaacgcgcgaagtcccgccaaaacggtgccacctggcagttgcgtagcctcaacaagctggaagcacacggaagcatgccgggttccgatgctcgaaaagcaggtcttgcagcaatgttgcaacagtatttacagaatcaagaaagcggccaacctgtccacacatgggctattggttcgtaaaacggcaaggaaagataata

SEQ ID NO: 1642 - protein, 473 aa, Corynebacterium glutamicum
MEDLEIFDRHLQHSDFEDQGSIGLELELNLVDKHMQPALAGHAVLSHLDDEYQSEIGNFNVEMNHPPLSVKGDALRRLEQGITSRLGRVRAAATSENVNVAMIGTLPTITPEFLEDPAWMTQENRYRALSNAVMESRGELVHINIADREQIIHDFTDLAPESTCTSIQLHLQLAPNKFAAAWNASQAIAGVQAALSANSPLFLGRRVWHESRIPVFQQAIDTRTPELVNQGVRPRVWFGERWITSVFDLFEENVRYFSPLIAESRALSGTPMMKGKSPALHYLNLHNGTVWRWNRPIYAPGEERSHLRLENRLLPAGPTPIDITADAAFYYGLVKYLAEENRPVWSRLLFPDAEKNFQSGARSGLFARMTWPTLGQVNVANLVQEHLIPQARIGLERLEVNKDLIDQYLGIITERAKSRQNGATWQLRSLNKLEAHGSMPGSDARKAGLAAMLQQYLQNQESGQPVHTWAIGS

SEQ ID NO: 1643 - DNA, 326 bp, Corynebacterium glutamicum
  CDS (1)..(303): RXA00200
cactacgccggagtcaccgagattcctgaataccgaatctccccagaccacggcggaaaatccaccctctccccattccaagactgggcaggcggcggatccatgggcacggccgaagcagtaaacaacgcctacgaaatcccgtcctacctccgcaacgactggggccgcgactggggttccatcgaacgctactcgctgcgcaccaactccaacggcgatgcacctaaggttgcagacatcaaccttgaaaccatccaacgttccggactctggaatccagggcatatgaaggtagatgaataagaccttcagtactggaagtt

SEQ ID NO: 1644 - protein, 101 aa, Corynebacterium glutamicum
HYAGVTEIPEYRISPDHGGKSTLSPFQDWAGGGSMGTAEAVNNAYEIPSYLRNDWGRDWGSIERYSLRTNSNGDAPKVADINLETIQRSGLWNPGHMKVDE

SEQ ID NO: 1645 - DNA, 441 bp, Corynebacterium glutamicum
  CDS (101)..(418): RXA00207
ctgcacaatttttggtcggacacatttttgcccccattgggttgtcggatcagatcaagaaaacccccgcggaaaaattttgtctctagactggctcaccatggaaatgaaattgaaaaaggcatcccaggtcagcactgccaccgtcgtcgcagcaggtttgatcggcggttggttgactgcccgtgaatccggcattcgcccactgggcaccattccattggcagcatccggagcgcttgctgcacgaagctggaatgaaaagaagggtcctgcagtagctactggcctgctggcaacctacgttggtgcatttggcctgtcccacccacttgccaagaagattggcgcgtggcctgcagttcttactgtgaccgctggcgctgctgcgattgcttacgcagtatctgactcccagtaataattacggtaaaaaaactt

SEQ ID NO: 1646 - protein, 106 aa, Corynebacterium glutamicum
MEMKLKKASQVSTATVVAAGLIGGWLTARESGIRPLGTIPLAASGALAARSWNEKKGPAVATGLLATYVGAFGLSHPLAKKIGAWPAVLTVTAGAAAIAYAVSDSQ

SEQ ID NO: 1647 - DNA, 786 bp, Corynebacterium glutamicum
  CDS (101)..(763): RXA00211
tgagccaaaatcaataaggtgtttttcagcctgaggtaaaaatacggtggtactgtcgaaaccaatcatcccctagttttgaaaagaaggaagcgagccaatgtcattcctgatccgcgtcctgttgtccgacaccccaggcagcctcgcgttactcgctgaagcccttgggattgtagaggccaatattcaatccgtggacgtggtggaacgcttccccaatggcacggtcatggacgatctggtgatctccatccctcgcgatgtcatggcagacaccatcatcaccgcagctgaagaagtcgacggcgtggagattgattccatccgcccattctccgggactgttgaccgccgcggacagatccaaatgctggctgctgttgctcaccaacgccgcgatatcaccgcagcgatggaagaaatggtcgatgtcatcccccgcaccatgacctctggttgggctttggtcattgatctaaaaggacccatcactcgcatcgctggttccctagcagcgcccgaagatgacggcaccgttccggagaacatcgttctcaaagaagctcgcatgctcaacccggaaaacgatccgtggattccagagtcctggacactgcttgattcttcccttgccatcgctccgatcggcaagcacggcctggctctgattatcggtcgccctggtggccctgatttcttggccagcgaagtggagcacttaggccaagtcggtgacattatcggagcaatgcttcaaaaataatctgagctgtttaaaaaatg

SEQ ID NO: 1648 - protein, 221 aa, Corynebacterium glutamicum
MSFLIRVLLSDTPGSLALLAEALGIVEANIQSVDVVERFPNGTVMDDLVISIPRDVMADTIITAAEEVDGVEIDSIRPFSGTVDRRGQIQMLAAVAHQRRDITAAMEEMVDVIPRTMTSGWALVIDLKGPITRIAGSLAAPEDDGTVPENIVLKEARMLNPENDPWIPESWTLLDSSLAIAPIGKHGLALIIGRPGGPDFLASEVEHLGQVGDIIGAMLQK

SEQ ID NO: 1649 - DNA, 1263 bp, Corynebacterium glutamicum
  CDS (101)..(1240): RXA00218
tctaaactcacgctagacttctaaaagatctaaagttcagttccaacacaagccagcactgcattccgcaaacccgactagaccatccaaggtgtcttctatgtcagctcgcaatccgttccgccccactttcggagtttcccccaccgtacttgcaggccgagactcacttctacagtctttcaaacttggtctcgcggaaggccccggaagcccctttagagcattgctgatttcgggatctcgtggcatgggtaaaactgtgttgctcaatgaatttgaagatgcagctgcgtctcaagggtggatcacgctgcgcgcctatccggataattccatggtggatggcttagttaattccgccatcccggaggcgctacagaatcttgacggaccgcagtccaaaagaatgctcagtggtgtggccattcctggtatcgctacggtgacggccattgctgatccaaccaagaaggatcccactcccacgctgatttccaggctccgcgagttggctactcgtttgcaaaagcacggctccggaattttgatcacccttgatgaactccaaagcgccaatgtggatcttttgcatgtgttggccactgcggtccaggatctcctacgggatgatttcgatatcgcattggtagcagcgggtctgccagagggaatcgatcgtcttctccagcatgagggcacaacctttatccgccgagccgaaagaatcctgctcaatcctgtcaaccatgaagattcggtggagatgttcctggataccgctgcggaaggccaacgccacatgacttccgaggccgccgaactcgcggcgcagatcagcaagggctacccctactccatgcagctgactggttctctggcatgggcgcgaagtactcttgacaactccgataccatccaggccgaacaagtagatgctgtccgcgacgaggttgtgcgccgcatgggcatgcaagtccacgagccaagcctgcaccaggtccctgatggtgagctgaccattttgtacgcgattgcccaactgtcaaaaaacggcgagatggtgtctactggagatatcgcacacctcatgggcgtcaagcccaacgccttgtcgatgcagagaaagcaacttctcagcagaggtctcgtagaggttcccaagtacggtttcctcaatttcactttgccgtacatgcgcgagcacctcctcaacagcccgcaccaccgaccaatcacataagacacaagcactaaaacagc

SEQ ID NO: 1650 - protein, 380 aa, Corynebacterium glutamicum
MSARNPFRPTFGVSPTVLAGRDSLLQSFKLGLAEGPGSPFRALLISGSRGMGKTVLLNEFEDAAASQGWITLRAYPDNSMVDGLVNSAIPEALQNLDGPQSKRMLSGVAIPGIATVTAIADPTKKDPTPTLISRLRELATRLQKHGSGILITLDELQSANVDLLHVLATAVQDLLRDDFDIALVAAGLPEGIDRLLQHEGTTFIRRAERILLNPVNHEDSVEMFLDTAAEGQRHMTSEAAELAAQISKGYPYSMQLTGSLAWARSTLDNSDTIQAEQVDAVRDEVVRRMGMQVHEPSLHQVPDGELTILYAIAQLSKNGEMVSTGDIAHLMGVKPNALSMQRKQLLSRGLVEVPKYGFLNFTLPYMREHLLNSPHHRPIT

SEQ ID NO: 1651 - DNA, 627 bp, Corynebacterium glutamicum
  CDS (101)..(604): RXA00220
agatcgtgccgagtttccggtttggatggggtttgggatgttaatgggagaggatcggcgtgatcgtgccggttttccttgcgttggtagtcttggggctatgagcgcattccacatccgagcggaacaatcgcacgatatcagcgcgattcatgatgttactgaagcggcctttacaggaattgagcattcagatggaacagagcaagatctcgtcgataagcttcgtgctgcaaaggcgctgagcctttcgctcgtcgctgaggcggatggcgaggtcattgggcatattgctgcctctgaggtgctgattggcggtggggtgcagggctggtttggcattgggcctgtcagtgttcggcccgataagcagcagcaaggcgtgggtattgcgctgatgggcagcgcgcttgatcagttgcgtgcggagggtgctggcggcatcgtgttgctgggggatccgggctattatcgacgcttcggttttgaggtcgtgcccgggctggtctatccggacgcgccagcggaattttttatggctgtgtgtttgaatgctccggcgtttccgcagggtgttgtggagtatcactcggcatttggagggtagagaccccatcgtggcgggcc

SEQ ID NO: 1652 - protein, 168 aa, Corynebacterium glutamicum
MSAFHIRAEQSHDISAIHDVTEAAFTGIEHSDGTEQDLVDKLRAAKALSLSLVAEADGEVIGHIAASEVLIGGGVQGWFGIGPVSVRPDKQQQGVGIALMGSALDQLRAEGAGGIVLLGDPGYYRRFGFEVVPGLVYPDAPAEFFMAVCLNAPAFPQGVVEYHSAFGG

SEQ ID NO: 1653 - DNA, 843 bp, Corynebacterium glutamicum
  CDS (101)..(820): RXA00230
aggtcttaccgcccctcaaatcctgcagattttccgtcgtcaatcagggacgaaagtacatcctatctatctagctccactagcacagataggaactccgttgattcatgagcaagacgttcagaagctgttaaactacatcacttcacactttggtgttgaccctgaaagatggtttcatcctgaaggctaccaaagcattgccctagcgattcttgactccatttactcgactggtaatcgctatacaggtgtactcaaccttgtcaatcgatactgcgggctgcgcgcaaatgaaggatcacaccctgaagccgatactgccactgatctcatcgagacattctaccggtggggaggggtcgacgaatttgttctcaaaacgaataatcggtggagaacttcctccaagattcacgcaccctataaggcatacgcagctttggaagcagcaaaggtacttgcgggtcattccatcgaatccatcagcgatgttgtcggcaggttcgattcgcgcgaaagccgtgaacactcagatatcgcgagagaatggttgatgataaccggccaaagtagtgcgttgacctggagttacttccttatgctcgtaggtgtcccaggagtgaaagcagaccgaatgatcgtccgtttcgtcactcacgtgctcgagcgtccgaaagagatttccaggcacgaagcttcacggttgattgaggaagttgcggacattatgtgcgtcaactacatctacctcgaccacaccatctggcggttccaatcagggcgcccctacctccaagaagactcctcccctttcgaataaatccatcacatttcacagtc

SEQ ID NO: 1654 - protein, 240 aa, Corynebacterium glutamicum
LIHEQDVQKLLNYITSHFGVDPERWFHPEGYQSIALAILDSIYSTGNRYTGVLNLVNRYCGLRANEGSHPEADTATDLIETFYRWGGVDEFVLKTNNRWRTSSKIHAPYKAYAALEAAKVLAGHSIESISDVVGRFDSRESREHSDIAREWLMITGQSSALTWSYFLMLVGVPGVKADRMIVRFVTHVLERPKEISRHEASRLIEEVADIMCVNYIYLDHTIWRFQSGRPYLQEDSSPFE

SEQ ID NO: 1655 - DNA, 517 bp, Corynebacterium glutamicum
  CDS (101)..(517): RXA00233
cgcctccagcagttgagggagaagttccaacacttgcaccaactgaggaagcaactgtgcaatagcgctttagacacagactcatgacagaatagaagacatgagtgtgaatgaagcagatctgaacgctgtcgaagagcaattgggaagggccccacgaggtgtcctcgatatttcttaccgcagccctgatggagtacccggtgtggtgatgaccgcaccaaaactggatgacggaaccccattcccaaccctgtactacttgacagatccacgcctgaccaccgaggcatcccgcctcgaggtcgcattggtaatgaagtggatgactgatcgcctttccaccgacgaagagcttcgtgccgactaccagcgcgcccacgagcacttcctggcaaagcgcaacgcaattgaagatctcggcacggatttttccggcggtggcatgcctgaccgagtgaagtgccttcacgtcctcattgactatgcactggcagaaggcccacaccatttcctt

SEQ ID NO: 1656 - protein, 139 aa, Corynebacterium glutamicum
MSVNEADLNAVEEQLGRAPRGVLDISYRSPDGVPGVVMTAPKLDDGTPFPTLYYLTDPRLTTEASRLEVALVMKWMTDRLSTDEELRADYQRAHEHFLAKRNAIEDLGTDFSGGGMPDRVKCLHVLIDYALAEGPHHFL

SEQ ID NO: 1657 - DNA, 663 bp, Corynebacterium glutamicum
  CDS (101)..(640): RXA00234
ttcagggctaaataaaagcgcttttcgacgcccggtaacctcaaggttgccgggcgtcgttgccttactactgttactggtgtgactatgatcgaggattatggcaaagcagaagaaaactcataaaggccttgttcctgtctcaagcagggaacgtgcttcagagtcagtttctgctacccgcgccccatttagattgggtgccgtcggcatcggtgcaatcgcactcgtagttcttctcatcctgtttgtcatcgcgattcctgtgcgtaactattttcagctgcgctccgacatcgcccaaacagaggcttccattgaagccaaagaacaacagatcaaacaactggaatctgacctcaacaggtaccaatcagaggcgtacatccgcgaacaagcacgcctgcgcctaggcgtcattgaacctggagaaaccgcgttcagaatcgtggacccagcactagataccgacacctcagtcacctctgacggcaacgaagagaaaccactgggagcttggtatgaaaacctctgggactcagtcaccaagccagaagcactcggcgaagaggaaattgcgcctccagcagttgagggagaagttccaacacttgcaccaactgaggaagcaactgtgcaatagcgctttagacacagactcat

SEQ ID NO: 1658 - protein, 180 aa, Corynebacterium glutamicum
MAKQKKTHKGLVPVSSRERASESVSATRAPFRLGAVGIGAIALVVLLILFVIAIPVRNYFQLRSDIAQTEASIEAKEQQIKQLESDLNRYQSEAYIREQARLRLGVIEPGETAFRIVDPALDTDTSVTSDGNEEKPLGAWYENLWDSVTKPEALGEEEIAPPAVEGEVPTLAPTEEATVQ

SEQ ID NO: 1659 - DNA, 501 bp, Corynebacterium glutamicum
  CDS (101)..(478): RXA00237
actggtagaagctttgatgatctacatcacaaatttacaatgtgtggtgagttattcatattacccaaggacttaaaccttaaaaggagccctaaaaatcatgaagctttcacaccgcatcgcagcaatggcagcaaccgcaggcatcacagtggcagcattcgcagcacctgcttccgcatccgacttcgcaaacctatcctccaccaacaaagaactgtcccctcagtacaactgggttgcttgcggcatccttgagggtggcctcaaagcagctggcgtccttgaagaaggccagtacaaccgcgagctcgcagaagcaatcgccgcaaagggtgaaggcttctggaccactcagttcccacaaatcggtgattggaacgaagatcaggcagcagcacttgccgaccgcgcacaaacctgtggcctagttaaggctgacacctacctttctgagctgtcctccaacttctcttcctaaaaggttcgggggtaacccca

SEQ ID NO: 1660 - protein, 126 aa, Corynebacterium glutamicum
MKLSHRIAAMAATAGITVAAFAAPASASDFANLSSTNKELSPQYNWVACGILEGGLKAAGVLEEGQYNRELAEAIAAKGEGFWTTQFPQIGDWNEDQAAALADRAQTCGLVKADTYLSELSSNFSS

SEQ ID NO: 1661 - DNA, 492 bp, Corynebacterium glutamicum
  CDS (101)..(469): RXA00238
aacagtcacataaatcacttcagtaacgtatgattttggactgttgtggcttttgccatatttatttcatttccatctcagtgatctcttaaggaaacccatgaagaaactacgtttcgccaccatcgctgccgctaccgttgccctgactgcgagccttaccccctcagcttccgcacaggatttcaaccaaatcatcgacaactttgattgcggcatccttcagaccgctatctacaccaccggcctggctcacgagaactccactcgctcagagctcgccgctaatctgcgcaactccgcagctgtcggccaactagacttcccattgaatatcgcggctaccggctactccgagcgcatcgctaaccgcgcactgacctgcggaatcgtgaaggaagatccacaggacttcctctcccagctgcagcttctgtcctctaacctatcttcttccttcttcactgcttagtttctcttgggcttttcctt

SEQ ID NO: 1662 - protein, 123 aa, Corynebacterium glutamicum
MKKLRFATIAAATVALTASLTPSASAQDFNQIIDNFDCGILQTAIYTTGLAHENSTRSELAANLRNSAAVGQLDFPLNIAATGYSERIANRALTCGIVKEDPQDFLSQLQLLSSNLSSSFFTA

SEQ ID NO: 1663 - DNA, 708 bp, Corynebacterium glutamicum
  CDS (101)..(685): RXA00239
acaaagcggatcagattaacaaggtccgtgacgctgtcgatgagcgcattggcaaaaacaacggcggcgaagagaatccagccaactagtattaggcgtcatgcgcgtcgtagttgttgatcctaaacaccccgtccttccagtctctttcctcgaggctgttcttgggcggggtgaacctgtttctatcgatcccgattttccatttgatattgaaaaatgggggatcaagacgtcgacaagcgcctcctggtttatcatcgcaaaaccgcaaagcacgctgcttatcgacgcgcccctcaaccctttgcatgaggccgtcggcgtcatgcgggcggccgtgggccgcggcgagtgggaacgcacgcaaacccatgagagtttgattccgtatctggaagaagaatcgcaggagtttattgaagcgattcatggtggcgatgatgagcacatgaaaagcgaactgggggatgttttgctgcaggtgctttttcatgcagaaatcgccgcccgtcagggtcgattcgacatttttgacgtggcggcgagtttcgtagccaagatgcaatctcgttcgccgtacctgttcgacggctctaccggaattgtggacaccgacgagcagcagcggctgtgggctcaaggaaaagcccaagagaaactaagcagtgaagaaggaagaagataggttagaggacagaagctgca

SEQ ID NO: 1664 - protein, 195 aa, Corynebacterium glutamicum
MRVVVVDPKHPVLPVSFLEAVLGRGEPVSIDPDFPFDIEKWGIKTSTSASWFIIAKPQSTLLIDAPLNPLHEAVGVMRAAVGRGEWERTQTHESLIPYLEEESQEFIEAIHGGDDEHMKSELGDVLLQVLFHAEIAARQGRFDIFDVAASFVAKMQSRSPYLFDGSTGIVDTDEQQRLWAQGKAQEKLSSEEGRR

SEQ ID NO: 1665 - DNA, 333 bp, Corynebacterium glutamicum
  CDS (101)..(310): RXA00240
tcatttaacgtagttgacgtacggcgaagtcgctaaacttcgcgtaatcttggggccaattaatcaagtgcagatgaattgtttagaaaggctggagaccatgggtatttttgacgaagctaagaagaaggcaaccgaattcctcgactctgattcaggcgagcagaagtccgatggactgctggataaggccgcagacaaagctaagggtctcctcggtgaagacaaagcggatcagattaacaaggtccgtgacgctgtcgatgagcgcattggcaaaaacaacggcggcgaagagaatccagccaactagtattaggcgtcatgcgcgtc

SEQ ID NO: 1666 - protein, 70 aa, Corynebacterium glutamicum
MGIFDEAKKKATEFLDSDSGEQKSDGLLDKAADKAKGLLGEDKADQINKVRDAVDERIGKNNGGEENPAN

SEQ ID NO: 1667 - DNA, 759 bp, Corynebacterium glutamicum
  CDS (101)..(736): RXA00244
agtgggaaagtgatgatgccacacaccgccggcggattacaggatggcagttcatcaggggtttaaacagtgaagatttggcagaaagcgagatggataaatgaatgatcagctgtgggaaggcgacactggaacgctgacttttgggtccaggaaagctctggtgcaattactcaaaggtcccatggtgaatgctttgcagcatgttgaagtgtggcgggctatcaccacagatcaagatgcgctcaatgctgtgcttaacaatttgttcctcgagttggttcttgatgaggatgcgggtgttgcatttactcggcctgccaatggtagacaagaagtattggttggaaataacaaaactgaagcgatgcccaaagtgctgcgcacggagacgctgtcgcattttgatacgttgatcattttgattctgcgccaagaactcaccatggcgccaccgggggaacgagtcattgtggatcgtgaagaaatccgcgaacaagtgttgctctaccgcgttgatgaagagcgagatgaagccaaactagctaagcgattcgacgctgcatttaggcgcatcgtggattattcattagctaaaaagacagagacacctgaacgttttgaggtctcaccagcactgcgccagatttttgatgccgacactgtggcaggtgtgcgcgctgagtacgaaaaatttaacaaagcagcccatgatggaaatgaagaggaacagaagtgaccagcgaacaagctttagat

SEQ ID NO: 1668 - protein, 212 aa, Corynebacterium glutamicum
MNDQLWEGDTGTLTFGSRKALVQLLKGPMVNALQHVEVWRAITTDQDALNAVLNNLFLELVLDEDAGVAFTRPANGRQEVLVGNNKTEAMPKVLRTETLSHFDTLIILILRQELTMAPPGERVIVDREEIREQVLLYRVDEERDEAKLAKRFDAAFRRIVDYSLAKKTETPERFEVSPALRQIFDADTVAGVRAEYEKFNKAAHDGNEEEQK

SEQ ID NO: 1669 - DNA, 1608 bp, Corynebacterium glutamicum
  CDS (101)..(1585): RXA00245
atgacctttgtttgaagttggtgcggtgatgggggagtgtgaccggattcgaacaggaatgtacgacacgtgtccaccccttctggaatagtcaattggcatgaccgttgtatcgcacgcgcttgggtttaagcgatttaggcaggaatccctggagctgtctttgttgcgcagtgacaactttccggtggtgctcgccgtggtagcgcagtattttccgcagggggctatcgctaagccggcctcagagctgtatcagctgctcagcgatgattttcgggtgctgcgtgaagaaggatttgagctgccgaaaagcccgtcggattatgtgagtgattgggtgaagtcccggtggtttgtgcgtcgtccgggtagttcgcagactggtgagaccgtggaaccgagtgaagagctgttggcggtgctggattcggtgcagcggtgggataacccgcatcgaagcatttcggcgtctcgaattgaatcgttgacgcaggcgttgcagactttggcgttggaatcggaccccagcacagcgaaacgtttagctgagttagagcgtgaacgcgacaggattgaacgccagattgaagcggtccacgctggtgaatttgaagtcctcaccaccgtgcagattggtgatcgggtagcagatattttggatctagcagcatctattcctgcagatttcgccagggtaaggcatgagctgagcgatctgaaccggaagctgcgcaggcagttgcttgatcctgaagattcccgtggtgatgttttggaagagatcttcaggggagttgatctgattggggattccgatgcggggcgcagcttcaatagtttctttgatgttttgctcgatcgggaacgctcaagtctgattgatcgatggatcagagaagttctgggacgcgatgaggctattgatctggattcaaaattaaggacagggctgtaccgaattttccgggatatggaggatgccagcttcgaggtcaacggggaaatgacagggctggctcgaagtttgcgtcactatgtcactaccgaggagttcgcagagagccgacgcatgattcagttgcttcgcgatacccgcagtgccgctgctaaggccgccgaggctggtgaagtgacctcactcaatcacatggacacaccactcgtgcgcattggtatggatgttcgctcgattgcggggttgaaactgaagaacccaggtgaagaacgcgtcgaagatttgcctgagccagttgaagaacaagaactagacactgaagtcttgatggaacaaattcgggcaagcgagattgattttgaggaattggaagaggctgtttctttagttcttgccgagcaatcgcacgccacgatcaccgaggtactagaacatttcccggcaacgcaaggtctcgccagcattgttggattgttatacctggcgatgcgtgatggtgttcccacaggtcgcgcgcaaatagtggagtgggaaagtgatgatgccacacaccgccggcggattacaggatggcagttcatcaggggtttaaacagtgaagatttggcagaaagcgagatggataaatgaatgatcagctgtgggaaggc

SEQ ID NO: 1670 - protein, 495 aa, Corynebacterium glutamicum
MTVVSHALGFKRFRQESLELSLLRSDNFPVVLAVVAQYFPQGAIAKPASELYQLLSDDFRVLREEGFELPKSPSDYVSDWVKSRWFVRRPGSSQTGETVEPSEELLAVLDSVQRWDNPHRSISASRIESLTQALQTLALESDPSTAKRLAELERERDRIERQIEAVHAGEFEVLTTVQIGDRVADILDLAASIPADFARVRHELSDLNRKLRRQLLDPEDSRGDVLEEIFRGVDLIGDSDAGRSFNSFFDVLLDRERSSLIDRWIREVLGRDEAIDLDSKLRTGLYRIFRDMEDASFEVNGEMTGLARSLRHYVTTEEFAESRRMIQLLRDTRSAAAKAAEAGEVTSLNHMDTPLVRIGMDVRSIAGLKLKNPGEERVEDLPEPVEEQELDTEVLMEQIRASEIDFEELEEAVSLVLAEQSHATITEVLEHFPATQGLASIVGLLYLAMRDGVPTGRAQIVEWESDDATHRRRITGWQFIRGLNSEDLAESEMDK

SEQ ID NO: 1671 - DNA, 846 bp, Corynebacterium glutamicum
  CDS (101)..(823): RXA00248
tccggcgataccctcgcagctggcttggttggccaccgcctacgcaataactggtcgatctagaccagtgtcttaggcaagaccccatttaggacacctcatgattcccctgattacgctttcccacggttcccgcaaaaagtccgcagctgcaggcattactgcgctgactcatgaggccggacgaatgctggaaacaccagccgtggaagcgcatttagagcttgctgaaccttcccttgatcaggttgtggcaacgctcagtgcggaaggtgtaaccagggcagcgttggttcctttgctgtttagcaatgcgtatcacgcaaagattgacgttcctgaggcagtaaaagatgcttcagaaaagtatggtgtggaacttctcgtgggtccgcatttgggcactggctccgatgtagccagcgtgcttgcgcagcggttgagtgcggacgcccccacagatgcccatgtgattttgtattccgttggcagctcacacgtgtccgccaatgaatcagtcatcgatcttgcccacaccattgctctcctcactggcttttcggttgaggtggtgcccgctaccggtgggccaggtgccggcggcgccggagtaatagaggtggcctcgaaacacaaggccgtccacatcctgccgctgtttgttacggaaggtttgctgctggatcgggctattgatcaatccgccaacatcgcagctgccaccggcacaaacttcacctattccgaacccctaactactgacctcgcaccacttgttgcagcccgttaccacgctgcattgagcgcactgctggcacatatctaagaccgctaaggaaatcagct

SEQ ID NO: 1672 - protein, 241 aa, Corynebacterium glutamicum
MIPLITLSHGSRKKSAAAGITALTHEAGRMLETPAVEAHLELAEPSLDQVVATLSAEGVTRAALVPLLFSNAYHAKIDVPEAVKDASEKYGVELLVGPHLGTGSDVASVLAQRLSADAPTDAHVILYSVGSSHVSANESVIDLAHTIALLTGFSVEVVPATGGPGAGGAGVIEVASKHKAVHILPLFVTEGLLLDRAIDQSANIAAATGTNFTYSEPLTTDLAPLVAARYHAALSALLAHI

SEQ ID NO: 1673 - DNA, 239 bp, Corynebacterium glutamicum
  CDS (1)..(216): RXA00250
gctttgggtgctgcgttgggtcagttcgatttcgtccgcaacaatattgatctgattttcttgctgatcgtgttcatttcggtggttcctggtttggtcggcatggcccgcaagctggctgacggccacaagcaagccaacaccgagccacaagaaaaccccgcagtccagacagccccagtaaaaacccaggaagcccaggaagccccccagaactaatctttccggtccgccagttc

SEQ ID NO: 1674 - protein, 72 aa, Corynebacterium glutamicum
ALGAALGQFDFVRNNIDLIFLLIVFISVVPGLVGMARKLADGHKQANTEPQENPAVQTAPVKTQEAQEAPQN

SEQ ID NO: 1675 - DNA, 366 bp, Corynebacterium glutamicum
  CDS (101)..(343): RXA00252
gcagcatgggggtgttggtggggccggggctgacagtgctgacgcggatgccgttgttggcttcttctttgcggaaggcgtcggcgagtccgcggagggcgtgtttgctggcggcgtagatggtgttgccggggtgtggtccgttgccggcgccggagttgatgtagatgacgcagccggatgccgcgcggagggcgggcaagagttggcgactcaactcggccgggacaatgacgttgagatcaaggtgtgcgtgccattcggccacactgccggcttcgatggtcgtgtcacgcgccaccgccgcggcgtgcaccagcgtatccacgtggtcgaggttttttagcttgtcgacgcctccctctt

SEQ ID NO: 1676 - protein, 81 aa, Corynebacterium glutamicum
VFAGGVDGVAGVWSVAGAGVDVDDAAGCRAEGGQELATQLGRDNDVEIKVCVPFGHTAGFDGRVTRHRRGVHQRIHVVEVF

SEQ ID NO: 1677 - DNA, 579 bp, Corynebacterium glutamicum
  CDS (101)..(556): RXA00257
catcatcaatggcgatgaaacgggtgcgctcagtacttgtgtatccatggctaatatcgggctacttcatactctgttgtaaacaaaggaagtttctatcatgaaaatcaagaaattcagcatcacagcgctagcctcagttctaatgctcacgggttgcgcgaccaatcacagctcacctctgtacagttatctgaatgcgtcaacatcaaccactgttgaacaagtacgtctcagcgatctttacggtgagcagtggaccgagttcgctcttgtctgcccctacaccacaaaagacgaggtaaaagaagagcttggtataaaaataaacacctacctcaccgattcgaccgatgacagtagtaacgatattgtgctcagggataaagacggttcatatgattggatctatttcaacagattcgacattgtgtacctctgcaacggctcagcggaaaatctaaaaatctaccccattgattcagttctagaatttgagcatagagacgactacggtacctggaaactgagcgctatcacagagccgggtaatcaataataacgcggacacttaagtac

SEQ ID NO: 1678 - protein, 152 aa, Corynebacterium glutamicum
MKIKKFSITALASVLMLTGCATNHSSPLYSYLNASTSTTVEQVRLSDLYGEQWTEFALVCPYTTKDEVKEELGIKINTYLTDSTDDSSNDIVLRDKDGSYDWIYFNRFDIVYLCNGSAENLKIYPIDSVLEFEHRDDYGTWKLSAITEPGNQ

SEQ ID NO: 1679 - DNA, 795 bp, Corynebacterium glutamicum
  CDS (101)..(772): RXA00258
taattaatataattaatgtagtttattaacctattatgcaatgacattttttaataattaaccacgtcacaacattctctcagatcacagaggttcgctcatgcgccacaccacgtcagccacatcaactacatctattattaagcgtgctatgaccattagtgccgctgttcttattgccagcgctgttggtctcacaaccagcgcaagttcgctcaatactctcagcgctacatcacctgaatcacccgatcaggcagccactgtgtcacaggctgaatcagatagtgaattagatgacggcatgaaaaagcttgcaaccaagatccttaatcgcgctgacaacgctgaaaataatgatgacaccggcaaaaacctcaacaatgatgataagaagctcaacacgaagcagccgcagcgccctgctgaaaaagttgcccaggcgatcgagctaagccttgataccaccacgaatgcagaaaagcctgataaaagttttcaccatgaaaaacccgtaaacgcctatgtcacaagtgtcagctacaacaaaagcaatgacacctggactatcaaaccatcagacagcgcggtgaatacaccgaccaatgatgctgagcgcatcagcaatatcatccaagaagctcgcgacctcggtctcagcgacgatgaatccttgacgcaacagatcgcatttcacgctcatgctgctaattatttagtcaccgaatgggtacttcgcggctatcagcttgctaacccgaaggtgcttccatgagaaaacaacgacgcatgatg

SEQ ID NO: 1680 - protein, 224 aa, Corynebacterium glutamicum
MRHTTSATSTTSIIKRAMTISAAVLIASAVGLTTSASSLNTLSATSPESPDQAATVSQAESDSELDDGMKKLATKILNRADNAENNDDTGKNLNNDDKKLNTKQPQRPAEKVAQAIELSLDTTTNAEKPDKSFHHEKPVNAYVTSVSYNKSNDTWTIKPSDSAVNTPTNDAERISNIIQEARDLGLSDDESLTQQIAFHAHAANYLVTEWVLRGYQLANPKVLP

SEQ ID NO: 1681 - DNA, 1299 bp, Corynebacterium glutamicum
  CDS (101)..(1276): RXA00260
gcaacagcggcttgcagatcagaaggcgcgagaggcgcgacagctgctagatattgaacgtcagcaggtgattgcagatcgctatgggccgttggtgaatatgcatagcgacgctgtgctagcgggtgcttcaataagagcaaaaataggtgctctcgcaactatttacggtgctcaaaacttagagaatgtcattcactcagttagttttactgacagacgtatttctcccgatggacaactgtcgaaagaattatttcgcgaagcttggagcgcaaaccttcttatccctgatccatcttctgatgtggaagcgtttgcgtggagcgaaaagaattccactgagctagcgggaggcatattcgttgagaaaatgctatttactgtcccggacacaggccgctccaataaccgtgtccagagcttctcagaagaacttcgtaaccacatttctttgaaagatatgtattctacacaacgtgaagagctattagaccttgcctacgagctcatggtgggggaagcagtacgttttgctaacttccgcctttatgatcagaatctcccaccacttactgaagcaaatatagacaaattgagagcccatctacgtgaggccgcagctagtgcgtcactaggagtgttatatctaatggtgtggcgatctgtaaaagacgcagctgcagcgcacactaaacatacaagaatgagcaaagaaaatgcgacaacgcatagtgttacaaaagtttctatctttgttgaccaattattaagcggaacattcccttgttcaaagccttttcacgaatcttcacaagtcccactgagtgaagccaccaagatagtttttaatttgattatggagtcaccgccgatggaaactgagccgagtgtgctgcgaaattccctccaagaacactcggattgggagctattgcaacagtgtgatgagaagattcctgatcgggagtttctgatggagtggttatatcaagaacagacgtggactgcagagcaattttttgatgctctagctatggtttcttctagcgagtttcgtatatgtgcacctggatgtgcgcatcaagtaagtgcagacatcgctacacaagtcttagaattccacgatcgagtgtctttccatgacgatcgtaaaagcgccatgcttgctgctgaagcaactattattggtaacaaaattggttcacaagcacgggccggagactttgttttaggtgaagtaatcaccaagctgcagaacatacctggtgaggtataacttctgcgtcgtccaattag

SEQ ID NO: 1682 - protein, 392 aa, Corynebacterium glutamicum
MHSDAVLAGASIRAKIGALATIYGAQNLENVIHSVSFTDRRISPDGQLSKELFREAWSANLLIPDPSSDVEAFAWSEKNSTELAGGIFVEKMLFTVPDTGRSNNRVQSFSEELRNHISLKDMYSTQREELLDLAYELMVGEAVRFANFRLYDQNLPPLTEANIDKLRAHLREAAASASLGVLYLMVWRSVKDAAAAHTKHTRMSKENATTHSVTKVSIFVDQLLSGTFPCSKPFHESSQVPLSEATKIVFNLIMESPPMETEPSVLRNSLQEHSDWELLQQCDEKIPDREFLMEWLYQEQTWTAEQFFDALAMVSSSEFRICAPGCAHQVSADIATQVLEFHDRVSFHDDRKSAMLAAEATIIGNKIGSQARAGDFVLGEVITKLQNIPGEV

SEQ ID NO: 1683 - DNA, 1236 bp, Corynebacterium glutamicum
  CDS (101)..(1213): RXA00273
tcggtcttggtggcggctccgtcattagttccagtaagtagttttttcactccctgttttgagtttttttctcacctttatatagataaggaatattcacatgtctttgaagcttaattctcgtcgtcttgcatccattgctgtcgctgttgcagtcggtgtctctggtgttgctgctgttggtgcggcaccagctacggctcagcaggtaggtgctggtaccccgattcacgttgtcaaccttgatcgcaccgttgttgatccagtgactggtgacatcaccttccacttcaccgacggcacttttgtcaccctcaaggcgggtgttgatggcaaggatggtaccgatggccaagatggtgtgatcggcaaggacgcaaccattgttgatgtcgctacggagtccaatggtgatgtcaagctcaccttctctgatggcaccgtcgtcaccattcctgcagctaaggacggtgtggatggtgaagatggcaaggatggcgaggacgctactgtggtgtctactgcgactgacgccaacggcaatatcgtcattacgttctctgatggctctgtgcttgttgttgctaacggtaaggacggcaacgatggctcagacggccaggatggtgctgatggtgaaaatggcaaggatggtgagaacggcgctaacgcgaccattgtcgatcagattgccaatgacgatggttccattaccattgtgttctccgatggttctgaggtcactatcccagcgccagctaagggtgccaccgatgagctggcacagtgtctgctgaacccgaagatgttgctgctggcagcaattcctgctgcaggtgctattgctaacgctgtggcaccggcgatcccacgtgttgttgaagatgtgcgtgcacagttcaatcttccaagcctcaacccccagtttgatcagtggctctacaacgcgaccaaggatattgatgcagggttgttgatctctggtgctaccggccttgctgtgctgtcggtgctcgctgatgatttctgtggcgacattgatgccgatgacaacgcagatggtgacgtggcggcagaaaagccaactggctcttctgggcttggatcatctgaacagagtgaaaaggttgatggtgacgacgatagtgtgatcgacactgaaactgatgcagatctcgaagtagaagaagaccctgagcttgttaacgcaggttaacgccagtgtaatgctggatt

SEQ ID NO: 1684 - protein, 371 aa, Corynebacterium glutamicum
MSLKLNSRRLASIAVAVAVGVSGVAAVGAAPATAQQVGAGTPIHVVNLDRTVVDPVTGDITFHFTDGTFVTLKAGVDGKDGTDGQDGVIGKDATIVDVATESNGDVKLTFSDGTVVTIPAAKDGVDGEDGKDGEDATVVSTATDANGNIVITFSDGSVLVVANGKDGNDGSDGQDGADGENGKDGENGANATIVDQIANDDGSITIVFSDGSEVTIPAPAKGATDELAQCLLNPKMLLLAAIPAAGAIANAVAPAIPRVVEDVRAQFNLPSLNPQFDQWLYNATKDIDAGLLISGATGLAVLSVLADDFCGDIDADDNADGDVAAEKPTGSSGLGSSEQSEKVDGDDDSVIDTETDADLEVEEDPELVNAG

SEQ ID NO: 1685 - DNA, 2733 bp, Corynebacterium glutamicum
  CDS (101)..(2710): RXA00274
agtttaaaagtcattaattactttatgggaaataataattaagttttcatcttttaactagttacagcatgttattaccttttatgaaaggcgtttcaccttgtctcttaatttgaagaagaattctgcgcgttctattaccgcgctgactgttgctggtctgggtctgtctattgttcctgcggcatctgcacaggatgttgcggatgacactaccaactccgattccacccgtgatgccatttgtgctgctgcaccgcttgttgcaggcgcagcagtgggtgttggtctgctgtctcagcagccagaattccagcatatggtgtcccagattcagtctgacgcacagcgcattgggcaggatctcagcaatcagttcaacaactctcttgaatcgctcaacattggcctcggtaacggcgtgcacggcccacagcagaacgctgtgcagggtattgatctcactgaagcagcacgaaccatggctggatggaatgacctggcggcacaggtgggccagactgcaggccctgctatcggcgctgttgctggtactgccggcctgatcgcactggttgactactgctggctggaaggcttcgacttcgcgggtggctccagtggcactgatggtgaaaatggtgttgatggtcaagatggtacctcgatcaccattactgagattaagactgatgatgacggcaataccattgttgtcttttccgatggttctgaaatcaccatcaccaatggtaaagacggcgctgctatcaccattgttaatacttaccgcgacgatgaaggtaatactgttgttgagttctctgacggttccaccattgttatcgacaagggtgaagacggtaaagatggagaagacggcaaggacggcgaagacggtaaggaccttaccgtaactgatacctacatcaacgatgatggagacaccgttgttgagctttccgatggttccacgatcattgtaaagaagggtaccgatggtaaggacggtgctgacggctctgacggtgctgatggagtcagcatcactgtggagaactcttatgttgatgcggacggcaacactgttgtcgaattctccgatggctccaatgtgaccatcaacaagggtgagaagggcgacaagggtgacgctggcgccgatggcgaagacggcgcagatggtgaatcaattactgttgttaacaccagcaacgatgctgaaggcaacactcttgttgagctctccgatggcactgttattaccattaataagggtgataagggtgacgctggcgccgatggtgaagatggaagtaatggcgcagatggcgagtccattacggtcatcgaaacccgtttcgatgcggacggcaacactgttgtggtgttctcgaacggcactgaaatcaccatcaacaagggtgagaagggcgacaagggagataccggcgaagacggtaaggacggactgaccccgtacatcggcccagatggtaactggtggatcggtgagaacaacacctgtactgctgcacgtggcaatgacggtaaagacggtgacaccccacgcatcggtgataatggtaattggtggatcggcatcgttgataccggcgttcctgctcgtggtcaggatggcgccaacggagccgatggtgctaacaccgttgagatcattaatggctactggtacatcaatggtgaaaataccggtgtcaaggcagttggtgaaaatggcaccaacggagccgatggacaagacggtgaaaatggaaccaacggtgctaacaccgttgagatcattaatggctactggtacatcaatggtgaaaataccggtgtcaaggcgcagggtccaaagggcgataagggtgacactggtgacacgggcgctccgggcgagggttccggtaatgtggacattgagatccgagaatcgagttatccaggtggtggccaggccaccatcatcattcttgatcaatttgaatatgaaatcccgcacactgttattggtgacaacggtaactggtacatcggtgaaaaggatactggtatcccagctcagggtggcactggaacacctggtgaggatggcctcacaccacacattggcgacaacggtaactggtggatcggtgataccgatacaggtgtctctgcaagcccgacccccgttggtgaggcggtagcgggtgtcactgatgtggtcttcaacactagtgatgaacccaagaccattactgcaacgatcaatggtgaagaatatgattacacccttccaccacatagtgctgttgtgttctacgctacaggttcaccaatggcatattctctaccgaatgcatcgggcctcactgttataggtactgaagagactcctggtttcaccactattcgattcagtgaccattccactgtgaccattccacatggacgagatggcaccaacggtactaacgaactgacggtaaggatggtctcaccccgcacatcggtgagaacggaaactggtggatcggcgaaaaggacactggtatttcgacaacctttggcggtggcggcaaccctggtaccggcaatgactgcatcacggtcccaggtgatgatcttggattcccagatgatgctgaggccggtgcagagaccggtgcagatgccgaaggtactattgactaaaggtcatagagcaacgaccatgactgattaaagtcggaacacaacccctag

SEQ ID NO: 1686 - protein, 870 aa, Corynebacterium glutamicum
LSLNLKKNSARSITALTVAGLGLSIVPAASAQDVADDTTNSDSTRDAICAAAPLVAGAAVGVGLLSQQPEFQHMVSQIQSDAQRIGQDLSNQFNNSLESLNIGLGNGVHGPQQNAVQGIDLTEAARTMAGWNDLAAQVGQTAGPAIGAVAGTAGLIALVDYCWLEGFDFAGGSSGTDGENGVDGQDGTSITITEIKTDDDGNTIVVFSDGSEITITNGKDGAAITIVNTYRDDEGNTVVEFSDGSTIVIDKGEDGKDGEDGKDGEDGKDLTVTDTYINDDGDTVVELSDGSTIIVKKGTDGKDGADGSDGADGVSITVENSYVDADGNTVVEFSDGSNVTINKGEKGDKGDAGADGEDGADGESITVVNTSNDAEGNTLVELSDGTVITINKGDKGDAGADGEDGSNGADGESITVIETRFDADGNTVVVFSNGTEITINKGEKGDKGDTGEDGKDGLTPYIGPDGNWWIGENNTCTAARGNDGKDGDTPRIGDNGNWWIGIVDTGVPARGQDGANGADGANTVEIINGYWYINGENTGVKAVGENGTNGADGQDGENGTNGANTVEIINGYWYINGENTGVKAQGPKGDKGDTGDTGAPGEGSGNVDIEIRESSYPGGGQATIIILDQFEYEIPHTVIGDNGNWYIGEKDTGIPAQGGTGTPGEDGLTPHIGDNGNWWIGDTDTGVSASPTPVGEAVAGVTDVVFNTSDEPKTITATINGEEYDYTLPPHSAVVFYATGSPMAYSLPNASGLTVIGTEETPGFTTIRFSDHSTVTIPHGRDGTNGTNELTVRMVSPRTSVRTETGGSAKRTLVFRQPLAVAATLVPAMTASRSQVMILDSQMMLRPVQRPVQMPKVLLTKGHRATTMTD

SEQ ID NO: 1687 - DNA, 582 bp, Corynebacterium glutamicum
  CDS (101)..(559): RXA00275
ctgacgcagacgttgcacagctcgcaaccgctattgacgaacagaaccgccccacaaagagctgttccctacggcagatcgcaaggaactattcgcctggttggataagcgtcgcccagaattaagcgacgatttcatcaaagcttttgatgatttccttcattcttttgcgtgcctggacaaaacaacgatcaccctattggcgcaatcaccggtgcgcacatccactggctatacaggtacttttatcggcatccccaataatgaaccactgtccgaagagcccacccccaccatttacattgtgcacgataatcacacagggataatccacagttaccccgcacgaatgattaatcttaaatctgagctcggttccgctgagatgattcacgaggcaatctgggggtcaccccatcaacagcagttaatctcatggtatgagacttactacaccaacatctactatggttttaacccacccactgaaccacataagagtcttgagatttttgctcaagacttctgtctgaccccaccagagaaacctccttttttctaaggcaaggcccgtggcacaca

SEQ ID NO: 1688 - protein, 153 aa, Corynebacterium glutamicum
LDKRRPELSDDFIKAFDDFLHSFACLDKTTITLLAQSPVRTSTGYTGTFIGIPNNEPLSEEPTPTIYIVHDNHTGIIHSYPARMINLKSELGSAEMIHEAIWGSPHQQQLISWYETYYTNIYYGFNPPTEPHKSLEIFAQDFCLTPPEKPPFF

SEQ ID NO: 1689 - DNA, 465 bp, Corynebacterium glutamicum
  CDS (101)..(442): RXA00276
ggcacactaccctatgactacaccgcaacccagcaaacctgcgccatggtcgcttgcctataagtatcaagccatcagcaatgatgattttgacaaccatatggatgacctcagcagtcgccaagaccatgaagcctacggcacgtacaaccccgataacggtgtcatgcccgatcatgtcatcgtgccttcaccctatgaaccatatgatgatgctgcgccgattgatcctttcgactacgacgaagatcttctcgatgagattaaagaagagcgcgctgcacatgcggttgacgcacaagtaacagaaacaactaaagctgacgcagacgttgcacagctcgcaaccgctattgacgaacagaaccgccccacaaagagctgttccctacggcagatcgcaaggaactattcgcctggttggataagcgtcgcccagaattaagcgacgatttcatcaaagct

SEQ ID NO: 1690 - protein, 114 aa, Corynebacterium glutamicum
MDDLSSRQDHEAYGTYNPDNGVMPDHVIVPSPYEPYDDAAPIDPFDYDEDLLDEIKEERAAHAVDAQVTETTKADADVAQLATAIDEQNRPTKSCSLRQIARNYSPGWISVAQN

SEQ ID NO: 1691 - DNA, 1509 bp, Corynebacterium glutamicum
  CDS (101)..(1486): RXA00279
tggggagcattcagaggtgcctaatcctctggatgattctgcggtgcaaaattcagccccacattcagccccacattcagctcggacccggttggagtttttggataccgatgactcgcctgatcattggcttgatccgttaacggagaaggatacttctaagcgcactctcgttaattcgattgttcaggaaactttcggccagcctatttttgttgcccgcaagatttgggctttcgtcaatacgtcgccgggccggatgacgttgatgacgattatcatttcgatcgccatttttgctgctggttacgccatgtcggtgtcttcggatactaggcagtccaatttggatgatttgatcactaatgcggagcctgtttcctataacgcgcatgtgctgtatacatcattgtcggttgctgataccactgctaccactggttttgttcaggctggtgtggagggcccggtgaatcgggtgaagtatcacactgctattgatcgtgctgcggttgctgctactcatactgcggcgtctgcggatagtagtaatgagcatttgatggagttggtgctggagattcagcgtcagttgccggtgtatacggggttggtggaaactgctcggactaataaccgtgcgggtaatcccgtgggtgtggcctatatgtctgaggccagcgcgatgatgcgtaatgaaattttgccgatggcgtctgagctttacaacctgacgagtcgtgcggtgtctgatcagcagcgttcggtgacgggtccgcagtggtttccgctgtctggattgcttgcggctcttgccatgttgattgttgcgcagtggtggttgatgcggattacgcgcaggcgcatcaacaaggggtttgccctggccacggtgatgatgatgacggcaacgttatgggtgtcagctgcaaactgggcgacgtggcaggctggcacgaagggttttgaggaagcgtcggggccgttgaattccatgactacggctcgtatttatgcgcagcagacccgcacgacggagacgttgtcgttggtgcgtaggcagtcgattcagggcagtggcactggttttaccgcaacgattaatcagattaagcgtgcgctggatgagtatgaaaccactgcgcagtcacagactccggagcatcagcagttgattacggcgattcgtaatgcgattgctgcatggactgccgatcacgatgagttcacggtgttgttggcgtctggtgattacaacggtgcggtcaatgcggtgctcaacaaagatgaggagggccagaccagctttgatgagctcgatactgcgctggctgagctgatcgcggattctcgcagctccatgcgttcctatatccagtcgggcctgcaggccacggagttggtgtccgtcatggtgatgattctgtctgtcgtttctgtgttggctttgtgggtcggcatccgcccccgtttgcaggagtacttataaatgcacgcttttcgacgccc

SEQ ID NO: 1692 - protein, 462 aa, Corynebacterium glutamicum
LDTDDSPDHWLDPLTEKDTSKRTLVNSIVQETFGQPIFVARKIWAFVNTSPGRMTLMTIIISIAIFAAGYAMSVSSDTRQSNLDDLITNAEPVSYNAHVLYTSLSVADTTATTGFVQAGVEGPVNRVKYHTAIDRAAVAATHTAASADSSNEHLMELVLEIQRQLPVYTGLVETARTNNRAGNPVGVAYMSEASAMMRNEILPMASELYNLTSRAVSDQQRSVTGPQWFPLSGLLAALAMLIVAQWWLMRITRRRINKGFALATVMMMTATLWVSAANWATWQAGTKGFEEASGPLNSMTTARIYAQQTRTTETLSLVRRQSIQGSGTGFTATINQIKRALDEYETTAQSQTPEHQQLITAIRNAIAAWTADHDEFTVLLASGDYNGAVNAVLNKDEEGQTSFDELDTALAELIADSRSSMRSYIQSGLQATELVSVMVMILSVVSVLALWVGIRPRLQEYL

SEQ ID NO: 1693 - DNA, 789 bp, Corynebacterium glutamicum
  CDS (1)..(789): RXA00282
atgagccgcgacgaccagacgaacaacaacggtgagggcgacgacacatcgcgcgagcagtcctgggatcaatcctggcagaacctaaataaggattcccagtacggtccgacctcgcatccggaggacgcgccgggaggattccagggaaacggccagggtaacagccggggcaacgctcagggcaatggtcagggcaatggtcagggctttggcccgggtaatgcttcgggatatggaggctacggtcagccatacccgcagactccgtaccagaattcctaccaaggttatggcgctacttcaccgcagaacgacgtggcgctggaagcgagcaacggcaaagtcgacatcatgcgggcgattcgcttcggattcaaagccacgtttgccaatccagcagtgtggattttgggcaccgtcggtcttggccttgcgttcatgattgtgagtgggttgcttggctacttatcatttttgatcgaccctaatgcgggcacgacgacttctggtttttcggtttccgagaccctgttgaacgtagctatcggaatcatcaccttcgcaataaccatttgcgtcatgcgcggtgcactgctttctgttgatggacacaaagttcgcttcggtgatttctttaaacccatcaatgttggtcaaacagtgattctgatggtggggctgggtatcttcggcatcatcctgggcaccttcaccacttttctcactcaaaatctggtgtcgtttaatgacgctgccggtaccgttgaggtcaataacagcggttta

SEQ ID NO: 1694 - protein, 263 aa, Corynebacterium glutamicum
MSRDDQTNNNGEGDDTSREQSWDQSWQNLNKDSQYGPTSHPEDAPGGFQGNGQGNSRGNAQGNGQGNGQGFGPGNASGYGGYGQPYPQTPYQNSYQGYGATSPQNDVALEASNGKVDIMRAIRFGFKATFANPAVWILGTVGLGLAFMIVSGLLGYLSFLIDPNAGTTTSGFSVSETLLNVAIGIITFAITICVMRGALLSVDGHKVRFGDFFKPINVGQTVILMVGLGIFGIILGTFTTFLTQNLVSFNDAAGTVEVNNSGL

SEQ ID NO: 1695 - DNA, 536 bp, Corynebacterium glutamicum
  CDS (1)..(513): RXA00285
ggaactgaattgggcgcattgttactgcgtgtcctcaacagggaagaaatgatggacagattcgcacgggagctgggttttttcgtcgacaagcagcttgaagaggtcgagcgcatcaactgtcaccataactacacggtccaggaggagcactacggcgagaccatttggctcacccgtaagggtgccgtgttggcggacgaaggcacgccggcgttgattccggggtcgatgggcaccgcgtcgtacgtgggcagtggcaagggcaacgccgaggcactgcggtcggcgccgcatggggcgggccggaggatgtaccgcaaccaggctaaaaagcgcttctcgacggccgacctggattctcggatggcgggcatcgtctaccggcccggcaaggagtggatcgatgaaattcccgacgcttacaaagacatcgatcaggtgatggccgatgctgccgatttggtgacaattcgccataaattgcgccagatcgtcaacgtgaaaggcacctaaagcgcattacggtaaagtgc

SEQ ID NO: 1696 - protein, 171 aa, Corynebacterium glutamicum
GTELGALLLRVLNREEMMDRFARELGFFVDKQLEEVERINCHHNYTVQEEHYGETIWLTRKGAVLADEGTPALIPGSMGTASYVGSGKGNAEALRSAPHGAGRRMYRNQAKKRFSTADLDSRMAGIVYRPGKEWIDEIPDAYKDIDQVMADAADLVTIRHKLRQIVNVKGT

SEQ ID NO: 1697 - DNA, 687 bp, Corynebacterium glutamicum
  CDS (101)..(664): RXA00286
ccataaattgcgccagatcgtcaacgtgaaaggcacctaaagcgcattacggtaaagtgcgagaggtattttgacgggtttagattgagggatgtggatagtgctgaaaatcccacggctgcttctacgccgtgtgcttccggtactcatcaccttggcgctcctgtgcggactggtgcttgcgtggtttatctatcctgcgaaggctgagcccaaaaaagatgatgtagttctggtgctggccggttccagcgatggtcgacacgaatatggtgccgagcttgttgaagaaggctacgccagcaattacgtcgtctccaacccgagtggctccaaagacaaagtgggatatgcccactgcgcaggaaagtcacggccaaaaaatgcggaaagtttctgcatggatccttaccccgtgatcacctccggcgaagcccgcacgtttaacgagcttgccaaaaaggaaggctgggaaagcgtattggtagtgaccagccgcacgcacacccaacgcgttcgcaccatgtttgaccagtgctataccggtgattccacagtgctcaacgtcaacagcctaggacgtaccgggcttcacaatgcagtactccacgagattggcggcttcattaaattttggattaccgctccgtgcgcggacacaaactaaggacgttccagctccaacag

SEQ ID NO: 1698 - protein, 188 aa, Corynebacterium glutamicum
VLKIPRLLLRRVLPVLITLALLCGLVLAWFIYPAKAEPKKDDVVLVLAGSSDGRHEYGAELVEEGYASNYVVSNPSGSKDKVGYAHCAGKSRPKNAESFCMDPYPVITSGEARTFNELAKKEGWESVLVVTSRTHTQRVRTMFDQCYTGDSTVLNVNSLGRTGLHNAVLHEIGGFIKFWITAPCADTN

SEQ ID NO: 1699 - DNA, 552 bp, Corynebacterium glutamicum
  CDS (101)..(529): RXA00294
ttgttggtgtgaggttgggttttgtcatcctgaatgcttcatttctaccctcgtgggtaaagttggtgccgaatcaacaatctcttttggaggaactttaatgagcatttccaacgcaatcctgcgtggtgtgtctggcgcttatattctgcagtccggctacggaaaacttggattgcctaatgaggccgctgctggcattcagggtctagctgcaacgggtatcccagcggtggctgatatggattcagatactttcggtaagtttgttgcctactcggagttgggtatcggtggagctttgcttgctccatttatccctagccgtcttgcaggtttgggtcttggtgctttctctacaggtttgttggccatttacttccgtaacccagcgatgactcaagacgacggaatccgcccttcccaggatggaaccggattgtctaaggatcttttccttgctgctattgcgggtgctttggtgttcgcacctgctaagaagcgtaagaaggcgaagaacaagtctaagtaagcttgcttgaacggcgcttg

SEQ ID NO: 1700 - protein, 143 aa, Corynebacterium glutamicum
MSISNAILRGVSGAYILQSGYGKLGLPNEAAAGIQGLAATGIPAVADMDSDTFGKFVAYSELGIGGALLAPFIPSRLAGLGLGAFSTGLLAIYFRNPAMTQDDGIRPSQDGTGLSKDLFLAAIAGALVFAPAKKRKKAKNKSK

SEQ ID NO: 1701 - DNA, 1035 bp, Corynebacterium glutamicum
  CDS (101)..(1012): RXA00297
aacaaggcaccggaaaacaagcaacgcaccttgcagaggtggtcttaagcatcttggagcaaaacaacatggcacaataacgatcatgcaacaggtgctcatgggtttcacggtggtgttcatcgtcatcggaataggttggattctcggtagaagagacaccttgggcacacatgcccagaaacctttgagcctgtttgtctattacgtggccaccccagcgttgttgtttgatcgggtcaccaagtcagatacctcgacgattttctctctgaacttcgtggtcattgcactctctgcgttgatcgtaggtttcctgtttttcctactcatgcggttcgtgatcaaaagaactgccgcagtatcggtgatcggcatgctagctgcgtcctacgccaacgccggtaacctgggtatccctttggcagcctatattttggatgatttcaccgtggtgattcccgtgattttgttccaggtggcgttctacgcaccgatcaccatgaccatcatggagatgctgaccaacaagaaatccaccaacttggtgcgcaacctcctggtcacgccactaaccaacaccatggtgctcgcagcgattgccggtattgctgtgtctttgacttcgatgagcgtgcccgtggtgattgctcagccagtggaaatgttggcgaatgcttcagtgccactggctttggtggtgttcggactgtccttgtccaagagcaagatcctggaaaaggggcaggtatccaggcgcgatgtgtttacggcggcactgttcaagaatgttctgcacccaattgttgcgggacttttagccttagcctttggtatggaaggtactgccttgttgtcggcggtgattctcggtgcactgccaacagcgcagaatgtctacacctacgcgttgcgatttagaacagctgaatcgatggcgagagacacaggggtggtcaccacactcatttccttccccgtattggtggcggtctccattatctttggatcttagggttagcattagtggtcatg

SEQ ID NO: 1702 - protein, 304 aa, Corynebacterium glutamicum
MGFTVVFIVIGIGWILGRRDTLGTHAQKPLSLFVYYVATPALLFDRVTKSDTSTIFSLNFVVIALSALIVGFLFFLLMRFVIKRTAAVSVIGMLAASYANAGNLGIPLAAYILDDFTVVIPVILFQVAFYAPITMTIMEMLTNKKSTNLVRNLLVTPLTNTMVLAAIAGIAVSLTSMSVPVVIAQPVEMLANASVPLALVVFGLSLSKSKILEKGQVSRRDVFTAALFKNVLHPIVAGLLALAFGMEGTALLSAVILGALPTAQNVYTYALRFRTAESMARDTGVVTTLISFPVLVAVSIIFGS

SEQ ID NO: 1703 - DNA, 303 bp, Corynebacterium glutamicum
  CDS (101)..(280): RXA00320
aacagacccactctagccgttgcgggttcttattgaggtctatagtggggtgctacacactacaaaccgtgatttgtttcgtgattggagctgagcccacatggctaaagaagatttgaagtggttctacgatctggcaaccggcaaggtttttcaaggcaaggtttccggctttgaaacccgcatgggcccatatgacactgaagaggaagcccatcacgccatctccattgcggcagcccgaaccaaggcagccgaaatttgggacgacaaggaagactaaaaaaaactggggtcacactt

SEQ ID NO: 1704 - protein, 60 aa, Corynebacterium glutamicum
MAKEDLKWFYDLATGKVFQGKVSGFETRMGPYDTEEEAHHAISIAAARTKAAEIWDDKED

SEQ ID NO: 1705 - DNA, 1938 bp, Corynebacterium glutamicum
  CDS (101)..(1915): RXA00321
caaagacaacacaggttccctatgaaaacggggaacctgtttcacctactttttaatcacgcttcacaatcacataagtctttaaaggatggatacaacaatgggccagcatctagaagtggaaactaagttttccgtcagtgaatcaactcagattccacaacttgaggctatcgcagaagtcgaccacattgatcgcaccgaaatccaccaactaagcgctgtttactttgacaccgtagatttgcgcctcacccgcgcaaaaattaccctccgtcgccgcaccggtggaaacgatgccggctggcacattaagttccccggaaccatcggtcgccgtgaagtccaagccccacttgatggcgaaggcgcaacagaaaccctccctccacgtgagctcttgggacacatccgagcgctgatccaaggccgtgagctgacccctatcgcccaggtggataatgaacgccacatgtcttacctcgcggatgaggacggcgcagtcatcgcagaattctgcgacgatcatgtatccaccgtgtcccaccttccaggtggcgtgcgcaagcagtggcgtgagtgggaattcgaactcgctgatggcaccctcgccgaagaagccatctcagtactgctgcaatctgcacagtcagtcctgaccgcagctggagcttttgtctccaacagcccatccaaacttgtttcggcgctggacgaatcagtcaaccacgcgccaaagcctccacagatggcgcagctggacaagaatgacccagcacgtggtgttcttgcagcaatcgcagccaacgcctcaaagatcgccgaatacgatcctcgagtacgcgccgatgaatatgattcagtccaccagatgcgcgtagctacccgagaactacgcagccacctccaaacctttgagggcatcctcggcggcgaagactacctcaacctggaaaaggaactgaaggttctcgccaacatcttgggtcgcgcacgcgatgctgaagttgtggaagagcgcctcagcaacctgattaacactgaggttggcgactccatcgaggaggagactaagaaggaactgcttgaagatcttggtgcagaataccgtcgtgagcatgagcgagtagttcgtgcgctggataatgatcgctacactgatcttcttcaggcactggaaaacctccttgttgatccaccgctgatcacagaagtcgaagaacccgaagctaccgaagcccctgagtccgctgagactaccgagtccactgacgtctctgaagcaaccgaagaagcagacgcagaagctgagtctgtcgaagaagctactgagcaggaagaatcagcagacgcgcctgaatctgcagatctggacgctctcgatgaggagtactcccctggttcccaagcgccggtggaggagccgaaggaaccgaagaaggttgatgctgctctcgtacttctagagcaccttgataaggcgcacgtgaagctcgtcaagctggaaaagaaggctcgctcacagtgggatgatctcagcattccgatgctggagcgggaagaaaacttccacaacctgcgcaaggctgccaagaagcttcgctacagtgcagaggcagtgggcaaagcaaccaccgttgagacgaagaaactgtacaaggcgtgcagtggtttgcagtcagttcttggcgattaccaagatgccattacttcccgtaatgagctgttgcgccgagctcaggttgcccgccgccaaggccgggataccttcgcatacggaatcctctaccagcacgaacaaaccctgtcgagggaatacctgactggttattccgatgcgttcaagagcgtagaaaaagcctatgcaaagctggctgaagataccgccaagcgttcaaagaagaacaagcgtaagtaaacgcaggcaataaaaaactg

SEQ ID NO: 1706 - protein, 605 aa, Corynebacterium glutamicum
MGQHLEVETKFSVSESTQIPQLEAIAEVDHIDRTEIHQLSAVYFDTVDLRLTRAKITLRRRTGGNDAGWHIKFPGTIGRREVQAPLDGEGATETLPPRELLGHIRALIQGRELTPIAQVDNERHMSYLADEDGAVIAEFCDDHVSTVSHLPGGVRKQWREWEFELADGTLAEEAISVLLQSAQSVLTAAGAFVSNSPSKLVSALDESVNHAPKPPQMAQLDKNDPARGVLAAIAANASKIAEYDPRVRADEYDSVHQMRVATRELRSHLQTFEGILGGEDYLNLEKELKVLANILGRARDAEVVEERLSNLINTEVGDSIEEETKKELLEDLGAEYRREHERVVRALDNDRYTDLLQALENLLVDPPLITEVEEPEATEAPESAETTESTDVSEATEEADAEAESVEEATEQEESADAPESADLDALDEEYSPGSQAPVEEPKEPKKVDAALVLLEHLDKAHVKLVKLEKKARSQWDDLSIPMLEREENFHNLRKAAKKLRYSAEAVGKATTVETKKLYKACSGLQSVLGDYQDAITSRNELLRRAQVARRQGRDTFAYGILYQHEQTLSREYLTGYSDAFKSVEKAYAKLAEDTAKRSKKNKRK

SEQ ID NO: 1707 - DNA, 1227 bp, Corynebacterium glutamicum
  CDS (101)..(1204): RXA00322
cgcggttttttgatgacacgggggtgggaggtgtccagcttgggtggttcactgagaaccgcaccgaaattagaacactcctacgaataaggaaaccgcaatgactctctcccacttctccgacaacgtcaccgacgcacaagactcttaccgtcagattttagaagaaagcatcatcagccacctaggtttctgtgcgcttcgtgggtggactcccgccgatctccgccatgagttttccgccgatattgatccactcctgtttcacgcgctacctgagattgcttactcctgctccgatgagatgtacacactgtgggtgaacggaacgcgtgccgccgaaactagccacttgccggtgatgaccctggagaagattctcaccgagctaccgaagctaagtaccttgcctgactgggcaatgctcgcagagctccacgccttagacaatcaagacaccagcccaatgaccccggcacaggccaaagcgcatcatcgtatcaccgcacttttgaaaaaggcagagtccaccaacttcgaagaagaagccgaagcattgatccttaaagcagagacacttcgacagcagtaccggattgaatcactgctgattaattcctatgaccaagatgtccaagctcgatcttctacgattcgtgcatctcgggtgtatctggaagctccatggatccgacaccaatacaaactgctcaatgccattgctcgggtgcattccagcgaagcgctgctgatcaccaaatctggcatctgcaccctcttcggcgagcaagatgacgtagcccacattattgatctgttcaacagtcttaatcgacaacgtgcccacttcatgaaaacgtcagcaggtgcccgaattgcccaattaaatggcgaaacaagctcatatcgccgtagttttatgatctcctacgccagccaaatctctagacttctcatctcagcaaaagaggatgcattcaacgaactagctggtcaggcaccactagctcacagcgccatcgttcctgtcctagagaacagaagtgtgaggtcaaaggaagcactgaaggaaaccttcccgaatatgcggacaatgaccttcaaatcgaccaaccgacgaggcattattgacggatttaatgctgccaatgaatcccaccttggcggggaatctgccagcttggaagactcaacattcatgttctagagcgggtgaaagccccattt

SEQ ID NO: 1708 - protein, 368 aa, Corynebacterium glutamicum
MTLSHFSDNVTDAQDSYRQILEESIISHLGFCALRGWTPADLRHEFSADIDPLLFHALPEIAYSCSDEMYTLWVNGTRAAETSHLPVMTLEKILTELPKLSTLPDWAMLAELHALDNQDTSPMTPAQAKAHHRITALLKKAESTNFEEEAEALILKAETLRQQYRIESLLINSYDQDVQARSSTIRASRVYLEAPWIRHQYKLLNAIARVHSSEALLITKSGICTLFGEQDDVAHIIDLFNSLNRQRAHFMKTSAGARIAQLNGETSSYRRSFMISYASQISRLLISAKEDAFNELAGQAPLAHSAIVPVLENRSVRSKEALKETFPNMRTMTFKSTNRRGIIDGFNAANESHLGGESASLEDSTFMF

SEQ ID NO: 1709 - DNA, 768 bp, Corynebacterium glutamicum
  CDS (101)..(745): RXA00325
aggatttctctgaggaatctagacgcagattaacttccgcttggcagcgaccgggataacaccgcggttgcggccacgcaggctcacaaaggacaccactatgacaagcattattgcaagcaacagcgacctatcggaggcgctgcgcacccacactgcgcaggcccatgaagaggccgagcactcaacgtttatgaatgatctgctcaccgggaagctcgatgcgcaggcatttatcaagttgcaggagcaatcatggttgttctacaccgctttggaagctgcagctcgtgcatgtgcagaggattcccgtgcggctggtctgctggacccacgcctcgagcgcaaggaaacgttggaagctgatctggataagctgcacgaaaacaccacctggcgtgacaacgtcacggccactgcagcgacagcgtcttatgtggaacgtcttgaaagcatcgaagcggccaaggatttccctcgtttggttgctcatcactatgtccgctacctgggtgatttgtccggtgggcaggttattgcacgtctggtgaacagggaatatggagtttcggaagaggcgttgagcttctactgctttgaagatcttggcaagctcaaaccgtacaaggataattaccgtgcagagcttgatgctttggaattaacagcagaggagcgtgctgcgttgctggatgaagcatctgatgcgttcaggtttaatcagcaagtttttcaggctcttgcttaaccgaaggtgaagtcttggcg

SEQ ID NO: 1710 - protein, 215 aa, Corynebacterium glutamicum
MTSIIASNSDLSEALRTHTAQAHEEAEHSTFMNDLLTGKLDAQAFIKLQEQSWLFYTALEAAARACAEDSRAAGLLDPRLERKETLEADLDKLHENTTWRDNVTATAATASYVERLESIEAAKDFPRLVAHHYVRYLGDLSGGQVIARLVNREYGVSEEALSFYCFEDLGKLKPYKDNYRAELDALELTAEERAALLDEASDAFRFNQQVFQALA

SEQ ID NO: 1711 - DNA, 603 bp, Corynebacterium glutamicum
  CDS (101)..(580): RXA00326
cctgatctttgcccctaagtggtttacgggctggaaaatggtacgtagtctcgggtgtaaagcacacttcggtactcgacaggaagttaggaattccaccatggcaatcaagctgtccattgacctatcagatgcaacattcgcagaactttcggcagtcatcggttacgcacatcagttgggtgttgatgcggatgagaagctcacctttgaaggtacagtccttaacattgaattcgacggcgaccttcagtttgatgatgtttttgatgcctttgatgaggcggaaattgagctcgacaaccctcgcgaagacggccccatctacgcagatgatctgatcgatgaggatgaggactaccgcgcacagaccaagagccagatcaacgacgaggttatcaacgagatccgcgatggtatttcaagcttcgttgatggcatcgtaaatggccttggccagggtcgccgcggtggacgttacggtgatttcggtgggccacgcggccctcgcggtccacgcaatgacggtccattcggcccatttggaccattcggtccgggataccgcggtccgcgtttctagcggttacggtcgggttttag

SEQ ID NO: 1712 - protein, 160 aa, Corynebacterium glutamicum
MAIKLSIDLSDATFAELSAVIGYAHQLGVDADEKLTFEGTVLNIEFDGDLQFDDVFDAFDEAEIELDNPREDGPIYADDLIDEDEDYRAQTKSQINDEVINEIRDGISSFVDGIVNGLGQGRRGGRYGDFGGPRGPRGPRNDGPFGPFGPFGPGYRGPRF

SEQ ID NO: 1713 - DNA, 594 bp, Corynebacterium glutamicum
  CDS (101)..(571): RXA00336
ttaggatcttaaaggtaggaaattgcgctttgcgacgtcgaaaagcaacgccttttgactgcagtatccgccctctacatgtttggatttgattgtaacaatggcaaagccgaagagaagttggcttgacggacccgaaattccagctgattttgacgatcctgatgcacccggcaggtggcctggcgaaaagttggggcttcctcaagaaggggccggctctctgtcctcagtggctcgtcgtatcggcggggtctgcgtggactggggtgtttcctgggttattgctattgtgctgtccaatttcacggatgtgctgggcgatgtagcgacatccacgctcattattttcgtgatcctgggttggcttaccggttggatctttgctcgcaccccaggtcatgccgtgtttggcatgggccttgcgcgtgtggatgcagaggaacgtgtgggctggtggcgtgcgctggttcgcccactgctgacgatcttgattctgcctgccgtgatggtggatgctgacggccgtgggctccacgacaaggcaacgggaactgcagttatccgcgggtaatttgtcttgagtgaaattta

SEQ ID NO: 1714 - protein, 157 aa, Corynebacterium glutamicum
MAKPKRSWLDGPEIPADFDDPDAPGRWPGEKLGLPQEGAGSLSSVARRIGGVCVDWGVSWVIAIVLSNFTDVLGDVATSTLIIFVILGWLTGWIFARTPGHAVFGMGLARVDAEERVGWWRALVRPLLTILILPAVMVDADGRGLHDKATGTAVIRG

SEQ ID NO: 1715 - DNA, 525 bp, Corynebacterium glutamicum
  CDS (1)..(525): RXA00337
gatgtggagggaggcgtcgaaaagcattctttaagcactgcggacattgcagctcgcgcacacgcccatatgaaatcccatgatgttttggggcggcagactacgccgcctcagccggagggcggcgttgctgcccggttgggcgggattgcgtggacaatgatccataagcaaatgctttcgcgtgacacaaaaggcctggatatcaccgtgttgagcaccattcctgagggggtggggctgggtgaaaattccgccatggatgtggcgctcgcattggcgctgtatcgggaaaatattgaggaagcccccacgaaggcgcgcattgcggacatttgttcgcagtccgcattcatgttcagtgagacttcagtgttgcgtgcgcggcacaccgaggcgttgcggggtgaaactggacacatttcggtggttgattacgccgatggttcggtcactcaggcgccacatccggtgagtcgttccgctggtttgtcggcatttgttgctgctgcgcaaactgaaact

SEQ ID NO: 1716 - protein, 175 aa, Corynebacterium glutamicum
DVEGGVEKHSLSTADIAARAHAHMKSHDVLGRQTTPPQPEGGVAARLGGIAWTMIHKQMLSRDTKGLDITVLSTIPEGVGLGENSAMDVALALALYRENIEEAPTKARIADICSQSAFMFSETSVLRARHTEALRGETGHISVVDYADGSVTQAPHPVSRSAGLSAFVAAAQTET

SEQ ID NO: 1717 - DNA, 840 bp, Corynebacterium glutamicum
  CDS (101)..(817): RXA00339
acaggttgaagttgatgtgatttcgatccgcacagacccctggaccatgtctgcgcgagcagtgaactaaattcttgagaactaaaaaaggagaacttcaatgaagctggacccatctctgcacaaaaccctgctgcagctcgccaccaccctgcgcacccaaaacgccaactccgcaccgaagaccaccccggagcaggaagctgtagacaaggctgtcgctgaactttcccgcaaccgcgacgctgcatccgctggacaaatggctgtcgatgacatggaaaacgaaatcctgcgcattcagtccgacgaacgcaaactgcgccgccgcaagaaagacggccaggacgcactcggtgcagaaactgacgaagagcgtcgccgcgacctcaaccacgacgtctacactgcgaagtcccgcatcgctgacctcatgagcgaactgcaagaagctcacaatgaaatccatgcgctgcgcaacaaccgcgacctcgcacagtctcgcgtcaaagacaccgaacgcaaagttgccgacgcccgcgcagccgcagaagccgccgcagcagcaaccccagaaggtgaagacccagcagtagtcatcgcacacctggaagagaaacttccctccgaagcactggcagaattccatgcacaacgcctcgaaaacggcgtaggcgcagcactcttcaacggccgctcctgcagcggatgcgccatggttctccctgcaaccggtatctccgacatccgcaacacccccaaagatgaggttccacagtgcccagaatgtggctcttacctcatcactgacatctcttagaaagaccacccagtgaaatt

SEQ ID NO: 1718 - protein, 239 aa, Corynebacterium glutamicum
MKLDPSLHKTLLQLATTLRTQNANSAPKTTPEQEAVDKAVAELSRNRDAASAGQMAVDDMENEILRIQSDERKLRRRKKDGQDALGAETDEERRRDLNHDVYTAKSRIADLMSELQEAHNEIHALRNNRDLAQSRVKDTERKVADARAAAEAAAAATPEGEDPAVVIAHLEEKLPSEALAEFHAQRLENGVGAALFNGRSCSGCAMVLPATGISDIRNTPKDEVPQCPECGSYLITDIS

SEQ ID NO: 1719 - DNA, 1082 bp, Corynebacterium glutamicum
  CDS (1)..(1059): RXA00349
gagaaaatcctggacgagttggagcaatcccctgcgtcttatggtttccctgttgcgttgcttggctggccaatgatgggtggtgctgttgctgtgctgttgggtggtggatgccaggtttccctaattgcttttattaccgcgttcacgatcattgccacgacgtcatttttgggaaagaagggtttgcctactttcttccaaaatgttgttggtggttttattgccacgctgcctgcatcgattgcttattctttggcgttgcaatttggtcttgagatcaaaccgagccagatcatcgcatctggaattgttgtgctgttggcaggtttgacactcgtgcaatctctgcaggacggcatcacgggcgctccggtgacagcaagtgcacgatttttcgaaacactcctgtttaccggcggcattgttgctggcgtgggtttgggcattcagctttctgaaatcttgcatgtcatgttgcctgccatggagtccgctgcagcacctaattattcgtctacattcgcccgcattatcgctggtggcgtcaccgcagcggccttcgcagtgggttgttacgcggagtggtcctcggtgattattgcggggcttactgcgctgatgggttctgcgttttattacctcttcgttgtttatttaggccccgtctctgccgctgcgattgctgcaacagcagttggtttcactggtggtttgcttgcccgtcgattcttgattccaccgttgattgtggcgattgccggcatcacaccaatgcttccaggtctagcaatttaccgcggaatgtacgccaccctgaatgatcaaacactcatgggtttcaccaacattgcggttgctttagccactgcttcatcacttgccgctggcgtggttttgggtgagtggattgcccgcaggctacgtcgtccaccacgcttcaacccataccgtgcatttaccaaggcgaatgagttctccttccaggaggaagctgagcagaatcagcgccggcagagaaaacgtccaaagactaatcagagattcggtaataaaaggtaaaaatcaacctgcttaggcgt

SEQ ID NO: 1720 - protein, 353 aa, Corynebacterium glutamicum
EKILDELEQSPASYGFPVALLGWPMMGGAVAVLLGGGCQVSLIAFITAFTIIATTSFLGKKGLPTFFQNVVGGFIATLPASIAYSLALQFGLEIKPSQIIASGIVVLLAGLTLVQSLQDGITGAPVTASARFFETLLFTGGIVAGVGLGIQLSEILHVMLPAMESAAAPNYSSTFARIIAGGVTAAAFAVGCYAEWSSVIIAGLTALMGSAFYYLFVVYLGPVSAAAIAATAVGFTGGLLARRFLIPPLIVAIAGITPMLPGLAIYRGMYATLNDQTLMGFTNIAVALATASSLAAGVVLGEWIARRLRRPPRFNPYRAFTKANEFSFQEEAEQNQRRQRKRPKTNQRFGNKR

SEQ ID NO: 1721 - DNA, 149 bp, Corynebacterium glutamicum
  CDS (1)..(126): RXA00355
atcgctttcggtcgcgcagctcaccgcatgaagcagcagggccaaagcggagctttcaccgtcctcgaagttgctccatacctgctctccccagagaacttggacgatctgatcgcacgcgacgtctaatttagctcgaggggcaagga

SEQ ID NO: 1722 - protein, 42 aa, Corynebacterium glutamicum
IAFGRAAHRMKQQGQSGAFTVLEVAPYLLSPENLDDLIARDV

SEQ ID NO: 1723 - DNA, 624 bp, Corynebacterium glutamicum
  CDS (101)..(601): RXA00375
cagcctgtcaaaatgctcaccgactacgcaccagaagacgctaaacggtaagtactgaagaatttttaaagacgacggagatttcaccacaatgccaagcatgttcccatcacccgcaactggcggagatgacatcaaccgacgccccctgaatgaaccaaacgcagatgcaaccaccatccccactgcactaaaagtggtgttctggatgctgtttgccactgcagcgttcatgatttttacaggcctggtgatgtacaccgccggatacacgggacctgatgatgtggatgagagctacaaagccgttgtggtgaacaaccaggagttcatcggtggcatcaatgcctttgctggcgtcgtgattgctgcacttacttcacaactgccaaagggcggcaagaatccgcgccgtcttttgttggccatcatgttgttggtattgctgacagatctgttgtcttttgccacccgcgctggaggcttcgcactcgcaatcatcgcagtcttgttggctttggaagcactcttgatgttccgcccagcagtcaatgatcacattgaccgaaatcatatggctcgtgtaatgaatcgcgagaagtagaacggttcgaccgtactttt

SEQ ID NO: 1724 - protein, 167 aa, Corynebacterium glutamicum
MFPSPATGGDDINRRPLNEPNADATTIPTALKVVFWMLFATAAFMIFTGLVMYTAGYTGPDDVDESYKAVVVNNQEFIGGINAFAGVVIAALTSQLPKGGKNPRRLLLAIMLLVLLTDLLSFATRAGGFALAIIAVLLALEALLMFRPAVNDHIDRNHMARVMNREK

SEQ ID NO: 1725 - DNA, 744 bp, Corynebacterium glutamicum
  CDS (101)..(721): RXA00380
caggcaatgcgacctcgcctcagtgacatccttggtgttccaagacgatcaaattgtcggcgtgcattacaacgaaccagctcaggagatttgatcactcgtgcgtttgaccaaactagcagcaacaatcggctgcgtgacactcagcggacttgcgctagtagcctgcagcagtgacagtaccgctggtactgacgctgttgctgtcggcggaaccttccaattccactccccggatggaaagatggaaattttctacgacgaggctgaccgtcaacaactccccgacattggtggagattccctcatggaagagggcacacagatcaacctgtctgatttcgaaaaccaagttgtcatcctcaatgcgtgggggcagtggtgtgcaccgtgccgctccgaatccgatgatctccagattatccatgaggaactccaagctgccggaaacggcgacacccctggtggcaccgtgttgggtatcaatgtgcgtgattactcccgcgacatcgcccaagactttgtcaccgacaacggccttgattacccaagcatttacgatccaccatttatgacagcagcatccctcggtggtgttcccgcatcggtgatcccaaccaccatcgtgctggataaacagcaccgccccgcagcagtgttcttgcgcgaagtcacctccaaagatgtgttggatgttgcgttgccattggtagatgaggcctaaatgtctgagattgtggtagc

SEQ ID NO: 1726 - protein, 207 aa, Corynebacterium glutamicum
VRLTKLAATIGCVTLSGLALVACSSDSTAGTDAVAVGGTFQFHSPDGKMEIFYDEADRQQLPDIGGDSLMEEGTQINLSDFENQVVILNAWGQWCAPCRSESDDLQIIHEELQAAGNGDTPGGTVLGINVRDYSRDIAQDFVTDNGLDYPSIYDPPFMTAASLGGVPASVIPTTIVLDKQHRPAAVFLREVTSKDVLDVALPLVDEA

SEQ ID NO: 1727 - DNA, 836 bp, Corynebacterium glutamicum
  CDS (1)..(813): RXA00387
caaaacgacccagaaacctgggaagactacgaacttcgcgtcaaccacccactgcgcatcgaaggcgaccgcgtctaccttcagggccacggcttcgccccaacattcaccgtgacctggccaaatggcgagacccgcacccagaccgtgcagtggcgcccagacgacccgaccttcttcctgtcctcaggcgtggtccgtttcgatccacccgccggcatgtacccagacctttacgagcgccgccaaaaccagttggccatccagggacttttcgcaccgaccgcggaatgggaaggcgacaacaacgaactgctgacctcctcctacccggcgatgcgtgacccagccgtggcgatcgatatttaccgcggcgacaatggcctcgataccggcatcggacagtcattgttcagcctggactctagtctcatgcacagcggcgtgctgcaaaaaattgagcgcgtcaacctccaaatcggcgacaccgtcaccctggatgatggcaccaccgtctccttcgacggcgcgtcagaatttgccaactaccagatcagccgcgaccccacacaaaactgggtgctggtcaccaccgtgatttcgctggtctccctggttggatccctgatgatccgacgccgccgcatttgggtgcgtttctatccacaagaaaacggaaccacccgcgtggaaaccggcggacttgcccgcaccgaccgcgcaggctggggtggcgaatacgagaaattccaccgcgaactgctgggtctgaaggaggaagatgaagacgaagagtacttcgaccacgacgactaacaccgcaatttaaaggcttt

SEQ ID NO: 1728 - protein, 271 aa, Corynebacterium glutamicum
QNDPETWEDYELRVNHPLRIEGDRVYLQGHGFAPTFTVTWPNGETRTQTVQWRPDDPTFFLSSGVVRFDPPAGMYPDLYERRQNQLAIQGLFAPTAEWEGDNNELLTSSYPAMRDPAVAIDIYRGDNGLDTGIGQSLFSLDSSLMHSGVLQKIERVNLQIGDTVTLDDGTTVSFDGASEFANYQISRDPTQNWVLVTTVISLVSLVGSLMIRRRRIWVRFYPQENGTTRVETGGLARTDRAGWGGEYEKFHRELLGLKEEDEDEEYFDHDD

SEQ ID NO: 1729 - DNA, 987 bp, Corynebacterium glutamicum
  CDS (101)..(964): RXA00392
tgcttgaaatacgttcggcaggctatgggggagtgtgaaacgctattgtgaaatgaatagataggttccatagtcgatcgaggaggagtcgcagaagtttatgtgggttggttatgcggttcgacagatcgccagtgtttttcttactcttttgcgcatgctgccactagcagcgcgaaatcgagttgccaggggacgcatcccggaaaccggcgatgtggtgatctcattgaccacccatgggaagcgaattaactacgttcacttcaccatcgaatcgatcgcacgcggccatgtgaaagcaccaattgtgctgtggttggacaaaccagactttgatgcgccgtggcctgccaccattaagcgacttgtcgcccgcggtctgcaagtacggtgcagcgacggcttctacggcccccacaccaaatactggaaccaattccgagaaatccacggcaccggcgtgcgtgtcgccaccgtcgacgatgacatgatctaccccgagtggttcctgcagcgcttgctttttattggcgacctgcgcatggatgcggttgtcgcctaccgggcgcacagaattgagcttcgcgacgaccgaatgctcccgtacgttaaatggagtgccgcagacacctcaaaagcgtcattcctgcactttgccacgggagtgtcaggcgttttgtaccccgtgaccttcattgattatgtggtctcccagggcgatgtattccttgagaactgcaagcgcgccgatgacgtatggctgcatgcctgcgcactgcgctctgatcaccctattcgccaggtctacgctcagccccgacacttcgctgtcgtgcccaccacccaagtgggagcactagttgttggcaacaccctcatgggtggaaatgatgagcagatcgccaaagtgtacaccgatgaagatgtggcaaaactagttgcagccagcaagaatgaagactaaaacagcttcgcgatagcacg

SEQ ID NO: 1730 - protein, 288 aa, Corynebacterium glutamicum
MWVGYAVRQIASVFLTLLRMLPLAARNRVARGRIPETGDVVISLTTHGKRINYVHFTIESIARGHVKAPIVLWLDKPDFDAPWPATIKRLVARGLQVRCSDGFYGPHTKYWNQFREIHGTGVRVATVDDDMIYPEWFLQRLLFIGDLRMDAVVAYRAHRIELRDDRMLPYVKWSAADTSKASFLHFATGVSGVLYPVTFIDYVVSQGDVFLENCKRADDVWLHACALRSDHPIRQVYAQPRHFAVVPTTQVGALVVGNTLMGGNDEQIAKVYTDEDVAKLVAASKNED

SEQ ID NO: 1731 - DNA, 456 bp, Corynebacterium glutamicum
  CDS (101)..(433): RXA00394
acccacttgaacctctccttaaatatttgcttcaacctcccacaatacggaactttgaggcattcttgggtatcggtatgtattgagtagggttgaatatgtgagtgagtccaatacccccaatctccagacacaccaagcgccggaattaaacccggaactacaaaaagctgcccggaaaaacgtgctgatttacggtctggcacgtttgcttctgttcgtcgtgctgaccttgattattcatagcctggctctgctgattagtgcgcctgtgccactcgttatgtctgcgatgctggctctgattgtggcgttcccattgtccatgctggtgttcagcaaactgcgcatgaatgccacccaggctgtttcccagtgggatgcacagcgcaaggcccacaaggaatgggttcgaagcgagctggcggaccgctaaaaaattcccctcgttctttg

SEQ ID NO: 1732 - protein, 111 aa, Corynebacterium glutamicum
VSESNTPNLQTHQAPELNPELQKAARKNVLIYGLARLLLFVVLTLIIHSLALLISAPVPLVMSAMLALIVAFPLSMLVFSKLRMNATQAVSQWDAQRKAHKEWVRSELADR

SEQ ID NO: 1733 - DNA, 423 bp, Corynebacterium glutamicum
  CDS (101)..(400): RXA00395
actcacatattcaaccctactcaatacataccgatacccaagaatgcctcaaagttccgtattgtgggaggttgaagcaaatatttaaggagaggttcaagtgggtaggcttttgctgattattttggttatcgtcgcaatcgtcttgctgtggaaggccttcaagccatctacatggaagcgtaacgcggagatcaatcagggccaggcacctcgtgcagtgaaaggccccgacgatgatgaagaattcttgtggaatattgaaaagaatcgcttcaaacagcgtcgcgccgacgaggctgcccaattagaagaggaagaacgtctcaaacgggccagggaacgctacgcaaagcctgaaagctcagaagaaggtccagagaagcccactgaggattcttaaaagggcttctttaaaaagat

SEQ ID NO: 1734 - protein, 100 aa, Corynebacterium glutamicum
VGRLLLIILVIVAIVLLWKAFKPSTWKRNAEINQGQAPRAVKGPDDDEEFLWNIEKNRFKQRRADEAAQLEEEERLKRARERYAKPESSEEGPEKPTEDS

SEQ ID NO: 1735 - DNA, 594 bp, Corynebacterium glutamicum
  CDS (101)..(571): RXA00396
atcccttggcgctacaacggtgtagccattggtaccgaggatctgtggtacatcggcgcagacaagacctacattttgagccagcgctaaggagaacccagtgacagaaattgcagaaaaccttcagcgcttgggtattgaattacctgatctaccagcaccgcagtattcctacgtaccgttcaaccgccaaggaaacaccctctatgtatcggggcagatttcacgaaccgcagcgggagacatcctcgccggacgagttggcgaagacgcaacattagaagaaggaatccacgccgcagaggtagccaccatcaatctgctggccagaatccaccaatccatcggtttagacaatgtggcccaaattctgaaactgaatgtgtgggtcaatagctccgatgactttattcagcagcctcaagtggccgacggtgcatcccagctccttgaggcagtgttgggtgaggccggaaaacatgcacgcacagcactacccacaaatactctcccccagggagcactagtggaattggatgctgtcgttgcggtcaccgaggccgccgaagtttaggacgcgtgggcgaaaatttc

SEQ ID NO: 1736 - protein, 157 aa, Corynebacterium glutamicum
VTEIAENLQRLGIELPDLPAPQYSYVPFNRQGNTLYVSGQISRTAAGDILAGRVGEDATLEEGIHAAEVATINLLARIHQSIGLDNVAQILKLNVWVNSSDDFIQQPQVADGASQLLEAVLGEAGKHARTALPTNTLPQGALVELDAVVAVTEAAEV

SEQ ID NO: 1737 - DNA, 563 bp, Corynebacterium glutamicum
  CDS (1)..(540): RXA00397
aacctgcactcctccaacagaatgctcttccctggacctcctgtggatttcccgatcaacgcagaaacccgatgcattcagctcgacgccggtgttgcagtaaagaaggacggcgtggtgctgggtacctcagatatggcgaggtccctgcctcgaaccgccgctggccaagaagcctatgagtacttcttcaaggtggttcgtgaaggcatcatcgggcagctgcgcccgggcgtgatctgcgctgacgtgcacgaagcaacccttgattacctaagcccgcagctacctcgcatgattgacatcggaatgctgggtgccgacaccgatttcaacaccatctaccgcaagcgcaatgttggccacctcatgggcaagcaggaatcctttgccaatgagcttcgccctggatacaagcacattcttcaccacggctcctatggtgccgcggagatcccttggcgctacaacggtgtagccattggtaccgaggatctgtggtacatcggcgcagacaagacctacattttgagccagcgctaaggagaacccagtgacagaaa

SEQ ID NO: 1738 - protein, 180 aa, Corynebacterium glutamicum
NLHSSNRMLFPGPPVDFPINAETRCIQLDAGVAVKKDGVVLGTSDMARSLPRTAAGQEAYEYFFKVVREGIIGQLRPGVICADVHEATLDYLSPQLPRMIDIGMLGADTDFNTIYRKRNVGHLMGKQESFANELRPGYKHILHHGSYGAAEIPWRYNGVAIGTEDLWYIGADKTYILSQR

SEQ ID NO: 1739 - DNA, 704 bp, Corynebacterium glutamicum
  CDS (1)..(681): RXA00398
tacctccccgagcctttcaccgtggaggattacactgcgcgtgttgaaggcctcgaagttgctggcggagcgattgtttccggttctttccaggctttcgaccagggctacctcaaagatgctctcgcagtgcttggcccaggctatgtcggtgtcactcagatccccgcagatacctctgatcaggagattcttgatctggacaaagctggcgtgaaggctgtgcgtttaaacttgaagcgcggtggttcggcaggtcttgacgatctcgagaccttggcacgccgagtccacgacctagccggttggcacaccgaactctatgtggatgctcgcgaactagacgagttggaatcaaccttggcctccctccctgctgtcagcattgatcacttagggctccaccgcgatggacttcccgcacttcttcgcttggtagaaaatggcattaaagtcaaagcaaccggattcggacgggtagaactagatccaactgaagtcatccaggcaatcatggctgtcgatcccactgctttgatgatcggaactgatcttccatccacccgcactaagcgacctttcgaagacgctgacctagatttgatcgctgaaacggttggcgaagatcatgtcgacaacgtcttctggaacaacgctgcagcgttctacctcggagaccagtagttttaagacccgaaatgtct

SEQ ID NO: 1740 - protein, 227 aa, Corynebacterium glutamicum
YLPEPFTVEDYTARVEGLEVAGGAIVSGSFQAFDQGYLKDALAVLGPGYVGVTQIPADTSDQEILDLDKAGVKAVRLNLKRGGSAGLDDLETLARRVHDLAGWHTELYVDARELDELESTLASLPAVSIDHLGLHRDGLPALLRLVENGIKVKATGFGRVELDPTEVIQAIMAVDPTALMIGTDLPSTRTKRPFEDADLDLIAETVGEDHVDNVFWNNAAAFYLGDQ

SEQ ID NO: 1741 - DNA, 570 bp, Corynebacterium glutamicum
  CDS (101)..(547): RXA00408
gggggagtttctcagccgtggctcacgagattttcgataatttggcaaagtggacattatgacaaatacgcacaggcgaaccccagaaccacatgagggcatgaatccagtgtcaccaaaactgaccacggccaggtacctcacccgcattccatggctgctgatcagcgcgattgtgtttggggtgcttggagtttttgtgtcttcgtggttttacgccggtgtgatcgtagttgccgtcattcttatctggcagctgtggctgatcccgcagcaggtcaagcgactgggatggctggaaacctccgatgagctgctgatcaccaagggaaaactgtggcacaccttcacggttgttccctatggccgcatccagtttgttgatgtcaccgcaggtcccctcgagcgcgcgtttggcatgaaacaagtgcaattgcataccgcgtcggcgtcctctgactccaccattcaaggcctgcctgtcgcggaagccgatgccttacgtgagcgactggctattaaggcccgggagaggatgagcggactatgagcagccttgaagggtttcga

SEQ ID NO: 1742 - protein, 149 aa, Corynebacterium glutamicum
MNPVSPKLTTARYLTRIPWLLISAIVFGVLGVFVSSWFYAGVIVVAVILIWQLWLIPQQVKRLGWLETSDELLITKGKLWHTFTVVPYGRIQFVDVTAGPLERAFGMKQVQLHTASASSDSTIQGLPVAEADALRERLAIKARERMSGL

SEQ ID NO: 1743 - DNA, 1536 bp, Corynebacterium glutamicum
  CDS (101)..(1513): RXA00409
cggcgtcctctgactccaccattcaaggcctgcctgtcgcggaagccgatgccttacgtgagcgactggctattaaggcccgggagaggatgagcggactatgagcagccttgaagggtttcgaaaagtccaccgcgccaccccattccttcgcatctggaccatcatcgtcgcagttctcgcggcattcgcattcaattccggcgcatccgttttaagtttcatctggggtgtcgtcaccggcgaatacggattcgcagtgctgccgattctattgaccgtcggtggcgccgtcattgtggtggcactggcctggattatcaccggaatttggtggaaagccgtcggattccgcatcaccaatgaagaggtgcagctgcaacgcggagtgatcagcaaagacctccgcaccgcccgatttgaccgtatccaagccgttgacctggtggaatcattcatcgcccgtatcttccgactggcagaagtccgcatcgaaaccgccggcggcagcgactccgccatcagcattggctttttaagaaaaagcgaggccgaggccctaaaaagggagcttctcgacgcctcccagcactcagtcgccaccaccccagccggagttccggctgagcctggggtaggggagaccgttgtagttgagagcgcgggcgatgttctggttccacaaatccccgtgcaacgcaccctcgccagcaccgccttatcactagcaaccatcatcaccgcgatcggtattgtgattttgctcttcgttcctttcggagtgagcattgccgtgccgttctttgtaggcatggtgccagcggtctggaacttgatcgataagtcgtggcaattcaccgcaacacagcgcaacgatgtcctgcatgtcagctatggacttgccaaccgccgcaaacaatcaatcccactgggacgcatccacgcagtgaaactaaaacagccattgctgtggcgactggttggctggtggaccgtgaccgtgcctgtagttggctacggcgacaccacccaaggcggaacctccaaaatcttgcccgtgggttccaaagaactcgcactaaaagtccttgaagcggtggggccactaaacagcgccgacatcgccgaatctgcagacccatcacatatgagcagaccccagtacacaccaccagttgctgcacgcctgctcacaccagtcgatcggacccgccaaggcgtcacgttgattggtgtggctggtgcccctggtgcggtggtcgtgcatgaaggcagattcatgccacgtatgtctgtgattgatacctcccacatccaagaactcacccttaaacacgggccgatccaaagaatactgggactctccaccgttgtgtttaacctggtccaagggccagtgggaatggccgcatcggatctcagtgcagctgatggaaaagaacttctcaacattctccgcaacagaaaactacccgcactggaatcagctccgctgggacaaaacagcctggactaaggtgtaatcatgcacatctc

SEQ ID NO: 1744 - protein, 471 aa, Corynebacterium glutamicum
MSSLEGFRKVHRATPFLRIWTIIVAVLAAFAFNSGASVLSFIWGVVTGEYGFAVLPILLTVGGAVIVVALAWIITGIWWKAVGFRITNEEVQLQRGVISKDLRTARFDRIQAVDLVESFIARIFRLAEVRIETAGGSDSAISIGFLRKSEAEALKRELLDASQHSVATTPAGVPAEPGVGETVVVESAGDVLVPQIPVQRTLASTALSLATIITAIGIVILLFVPFGVSIAVPFFVGMVPAVWNLIDKSWQFTATQRNDVLHVSYGLANRRKQSIPLGRIHAVKLKQPLLWRLVGWWTVTVPVVGYGDTTQGGTSKILPVGSKELALKVLEAVGPLNSADIAESADPSHMSRPQYTPPVAARLLTPVDRTRQGVTLIGVAGAPGAVVVHEGRFMPRMSVIDTSHIQELTLKHGPIQRILGLSTVVFNLVQGPVGMAASDLSAADGKELLNILRNRKLPALESAPLGQNSLD

SEQ ID NO: 1745 - DNA, 798 bp, Corynebacterium glutamicum
  CDS (101)..(775): RXA00411
catttggcaaaatgactgttcgactcaccggcaacaccgctgcgattgaagagttctatcaaaccttgaccaagaccacgaccatcaaggagatcacccgatgaacgagatgatcctcgcagctgactggaaccggctaggacccaccttccaaacagccatcattgacaccctgttgatggtcatcatcaccatggtggtggctggcttactgggtcttgtcgtcggcctgctgctttacaccacccgcgctggtggaatcttgaagaacaaggtcatctacaccattttgaatgtgctggtgaactttgttcgacccatcccattcattattttgatcgccgccatcaagccactaacggtcgccgtcatgggcacctccatcggccgagatgccggcatcttcgtcatggttgtcgcagcgattttctctgtggctcgaatcgtggagcaaaacttggtctccattgatcctggtgtcatcgaggcagctcgctccatgggtgcgtccccgatgcgcatcatcgccaccgtgatcattccagaagcacttggaccattggttctgggttacaccttcctgttcatcgcgatcgtcgatatgtccgcaatggtcggctacatcggtggcggtggtcttggtgacttcgccattgtttacggctaccgcgccttcgacaacgaagttatgtacgttgccgtcctggttatcgtcatcatcgtgcaggcagcccagcttctgggcaattggctgtccaagaagatcatgcgccgctaaacctcttgcatagaaaaacc

SEQ ID NO: 1746 - protein, 225 aa, Corynebacterium glutamicum
MNEMILAADWNRLGPTFQTAIIDTLLMVIITMVVAGLLGLVVGLLLYTTRAGGILKNKVIYTILNVLVNFVRPIPFIILIAAIKPLTVAVMGTSIGRDAGIFVMVVAAIFSVARIVEQNLVSIDPGVIEAARSMGASPMRIIATVIIPEALGPLVLGYTFLFIAIVDMSAMVGYIGGGGLGDFAIVYGYRAFDNEVMYVAVLVIVIIVQAAQLLGNWLSKKIMRR

SEQ ID NO: 1747 - DNA, 576 bp, Corynebacterium glutamicum
  CDS (101)..(553): RXA00423
agttctttgaaaaacgtggcgcttccaggccattcacctgcactggcatggtgtacgccgcttttatttacgcaatctgtgagctggaggcccgcacaaaatgacctatcccgtgttgagtgttttggataattctggcgatcacaacatcatctggcatgtgcaaacttatcccgcggcgctgcccaccggggcgtggattgccgatgagcaacaactgactgacctgctgaaagacacagtagtgttccttacccctgggagcaccgctccggaaaatgcccccgtggcgacgatagaaggggtgcgggttgacgtcgataagcaggtggcagagtacaacaaacatgggatccgcctgcccagcttgggcgcgcgcactgtggaggcgcagtaccgcggcgagccggaggcagaggctgcgtggcgcacggcgatggagctcgtagagatcgcaggcggctggctagaaattgaagccaagcgccgggcgcggaaggcgctggctgaggccttcggcgcggaggtccagccactgccgcttgacaccgaataggacaaatgggtctatcctgg

SEQ ID NO: 1748 - protein, 151 aa, Corynebacterium glutamicum
MTYPVLSVLDNSGDHNIIWHVQTYPAALPTGAWIADEQQLTDLLKDTVVFLTPGSTAPENAPVATIEGVRVDVDKQVAEYNKHGIRLPSLGARTVEAQYRGEPEAEAAWRTAMELVEIAGGWLEIEAKRRARKALAEAFGAEVQPLPLDTE

SEQ ID NO: 1749 - DNA, 594 bp, Corynebacterium glutamicum
  CDS (101)..(571): RXA00424
gcgatgtggacctcgggagccttggcttttttgaatctttcaaacatgcccaccaccttaatcagtgagtagtcttggcaacatggataccaggatgagattgcaggtagcagcaggttccgcgctgattggtgctggggttgcggttaatgattacgtacaaagcccagtccgccgggccatcagttatggtgcgttggcgctttctggggcgacggtgattgcgatgggtcaggacccgactggggagcggtccatcattgcgaaagattccgcgacgatggttgatcaaatccgccaggagatcggcgatttgggtgtcacgcctggtccagaatctgatgtggatgccatcacggagcgaggtccgctggtgacgtggctgttgcttgctgtttttgtcgtggcatttttcaccttggcgtatttctccatgcgcatggatgtggcggtgatgagaaggatcgctaagttctttgaaaaacgtggcgcttccaggccattcacctgcactggcatggtgtacgccgcttttatttacgcaatctgtgagctggaggcccgcacaaaatgacctatcccgtgttgagtgtt

SEQ ID NO: 1750 - protein, 157 aa, Corynebacterium glutamicum
LQVAAGSALIGAGVAVNDYVQSPVRRAISYGALALSGATVIAMGQDPTGERSIIAKDSATMVDQIRQEIGDLGVTPGPESDVDAITERGPLVTWLLLAVFVVAFFTLAYFSMRMDVAVMRRIAKFFEKRGASRPFTCTGMVYAAFIYAICELEARTK

SEQ ID NO: 1751 - DNA, 348 bp, Corynebacterium glutamicum
  CDS (101)..(325): RXA00425
accgcaaccccagcaccaatcagcgcggaacctgctgctacctgcaatctcatcctggtatccatgttgccaagactactcactgattaaggtggtgggcatgtttgaaagattcaaaaaagccaaggctcccgaggtccacatcgcggcggaacgcaccaaccttccgcttaacgatttcatgacccgcctcttcgcccaggaactccccctgctcgatagcacctcacgttcagaggtctaccgcctgcttcgggaatacgacggcccaacaattagctcccaggaagaaatccccgcagagattcgtgaactcatggatctttaggcaataaatgtgagattgga

SEQ ID NO: 1752 - protein, 75 aa, Corynebacterium glutamicum
MFERFKKAKAPEVHIAAERTNLPLNDFMTRLFAQELPLLDSTSRSEVYRLLREYDGPTISSQEEIPAEIRELMDL

SEQ ID NO: 1753 - DNA, 756 bp, Corynebacterium glutamicum
  CDS (101)..(733): RXA00428
agcgtcgcagggatcggcgcgatcttcctccttccgatcggcatcatcatgtgcctcatcgccggattcaaccgctactacgcagcccttaaggtctaaaatgcccggtctagttctctccacaaacgtcgcccatatccaacaagacccaggtggcgatgaccgcatcagcggcatcaacaaactccccgtcgccaccggcatcgatgtattcatccccggacccaactacggcgacggctccggcgtagtcggcgacgccatcggcgattccctccaccacggcggcgcccacaaagccatctacgcctacagccgcgaagaactcgacttctttgaccccacctaccgcaacggatacttcggcgaaaacctcaccaccagcggaatcgtgttggaagacctcctgatcaaccaacaagtgcgcatcggcaccacgctgctcgaagtctccattccccgccgaccctgccgcacgttcgcccactggctcgacatcaaaggctggctaaaaaccttcacccaacgcggcctccccggcagctacttccgagtcatcgaagaaggccacatcaaccccggcgaccccattgaagttctgcaggcccccgaccacgacatcaccatgtccatggccttccgtgcaaaaatgggaaacaaagacctcgcgcgccgggttgttgcagccaactgtctcccagcgcgctaccacgaggaactactaaaactgatctagggcctattgaatttctcgtc

SEQ ID NO: 1754 - protein, 211 aa, Corynebacterium glutamicum
MPGLVLSTNVAHIQQDPGGDDRISGINKLPVATGIDVFIPGPNYGDGSGVVGDAIGDSLHHGGAHKAIYAYSREELDFFDPTYRNGYFGENLTTSGIVLEDLLINQQVRIGTTLLEVSIPRRPCRTFAHWLDIKGWLKTFTQRGLPGSYFRVIEEGHINPGDPIEVLQAPDHDITMSMAFRAKMGNKDLARRVVAANCLPARYHEELLKLI

SEQ ID NO: 1755 - DNA, 525 bp, Corynebacterium glutamicum
  CDS (101)..(502): RXA00429
cgatggtggtcgccttcgtgatcgcccaaggcacccggaacggtcatcaacttcatcgtccaaagaaccatcattttccgagtgaagtaaggtacccctcatgaagaccttcaatcccaccatgattgccggactcatcggcgtactctacttcgtgctgctcaccctgattttctccatccaagacatggaactagcagcagaaatcgccttcggaatcgtcaccatcgtcggcctgatcgcggtgtgggacaacttccgcgaccgcaacaactccacctggaaaacctggaccggcctcgtcggcggactgctaatcgccgtccccggaatctgccttcttgtgggaaacctcgtgctcctcgcagtcgacggcaacccctcaaccatggtgaacaccctgctcagcgtcgcagggatcggcgcgatcttcctccttccgatcggcatcatcatgtgcctcatcgccggattcaaccgctactacgcagcccttaaggtctaaaatgcccggtctagttctct

SEQ ID NO: 1756 - protein, 134 aa, Corynebacterium glutamicum
MKTFNPTMIAGLIGVLYFVLLTLIFSIQDMELAAEIAFGIVTIVGLIAVWDNFRDRNNSTWKTWTGLVGGLLIAVPGICLLVGNLVLLAVDGNPSTMVNTLLSVAGIGAIFLLPIGIIMCLIAGFNRYYAALKV

SEQ ID NO: 1757 - DNA, 534 bp, Corynebacterium glutamicum
  CDS (101)..(511): RXA00430
tgcccccgtggatcgcctggacatttatagggagctgctgtgtttctaggtattgtgtaacctcgtgtccgaaaatcttgatgttacgatcgtccgaccaatgagcctgaaaacccaagctttccggttcatcctcaccggtggcctctcagccatcgtggacctcggcctgctgtcacttttgcagctagtgttcggccttcccgtacctgttgcccgcacgatctccttcatcgccggcaccaccaccgcctacatgatcaaccgccggtggaccttccaagcagaaagctccacctccaggttccttgctgtggtggccctctacggcgtgaccttcctgatcaacattggactgcaaaccctctgctccgcattgtttgagaattggggctggaacgaagccgtcgcgatggtggtcgccttcgtgatcgcccaaggcacccggaacggtcatcaacttcatcgtccaaagaaccatcattttccgagtgaagtaaggtacccctcatgaagaccttcaatcccaccatg

SEQ ID NO: 1758 - protein, 137 aa, Corynebacterium glutamicum
MSLKTQAFRFILTGGLSAIVDLGLLSLLQLVFGLPVPVARTISFIAGTTTAYMINRRWTFQAESSTSRFLAVVALYGVTFLINIGLQTLCSALFENWGWNEAVAMVVAFVIAQGTRNGHQLHRPKNHHFPSEVRYPS

SEQ ID NO: 1759 - DNA, 648 bp, Corynebacterium glutamicum
  CDS (101)..(625): RXA00433
gtctccagcgactcaaacatcaaaaattgatatttgcgacaagttgaaatcatacccgatagtctcgaacatactaaatcacctaatcagggggaattacatggatgtgttaaagatcgccatcatcgctgcagccatgattggtgtgccggttctggtggttttcctcattgtgtttgcggtgcacaagttggctaaggaagtgccgcggtctggtcgtcgtccgggtattgggttggggttgttgcttggttttgttgcggggctcatcgtgtggtttgtgtggttgagttggggtggttattacgagaatgagtttgggcagatgcaaggtccgtatcgtccgtggcaggttgttgcttgtggtgtcacgatggtcgcggtcactgtgattcttggtctgtggactaggtggactgcgtctggtccgttttattcggcgttgggtggtgcgtcggggtttagtttcgcgtgggccatggatgccattcctcaggatgaaaccggattgtcggcgtttggcttagtgatggtcattgttggtgttggtgcggggctaaatgtggtggcaactctgacgtcaatcggcgcaacgatctggaataaccggctaccctcgaatgcatgactaaaaccacgcgccaaacc

SEQ ID NO: 1760 - protein, 175 aa, Corynebacterium glutamicum
MDVLKIAIIAAAMIGVPVLVVFLIVFAVHKLAKEVPRSGRRPGIGLGLLLGFVAGLIVWFVWLSWGGYYENEFGQMQGPYRPWQVVACGVTMVAVTVILGLWTRWTASGPFYSALGGASGFSFAWAMDAIPQDETGLSAFGLVMVIVGVGAGLNVVATLTSIGATIWNNRLPSNA

SEQ ID NO: 1761 - DNA, 615 bp, Corynebacterium glutamicum
  CDS (101)..(592): RXA00451
ggatccgccgatgaggccgaggcccaggatgcatactgggcgggaaatgtctttggtagtcacctgacaagtgtggcacatacctactacggttatctctatgaacactgaagaggatggcctgagctttgcagttacggctaccttagttgaaggtaaatggcaggtacgcgagtttgaggatcacttctccaagctctctacctctattaatgcggttcgctcgctgcgtagcgaggggccggcgtttgcgctgttgtgcgttgatgatgaatattttgtgatggtgcgtcccaccccaagtagggtattccttttcctttcggatgcgccgatggctgtcgacgatgatttcgccgccgcggtgatggatgaactcgatgcggatcttccagatatcaaccctgatgatttggacgacatcgatccatggccagaaggtgatttcgatattttggcggatttggggctgtctgaggaggttctttccgtgatttgcgatgacatggatttggatccttccgaacaattgctgcgcatcgcggaagaactcggttttgataatgatctggctcgggtggtgggattcgactagtgggcgttttacctgtgcag

SEQ ID NO: 1762 - protein, 164 aa, Corynebacterium glutamicum
MNTEEDGLSFAVTATLVEGKWQVREFEDHFSKLSTSINAVRSLRSEGPAFALLCVDDEYFVMVRPTPSRVFLFLSDAPMAVDDDFAAAVMDELDADLPDINPDDLDDIDPWPEGDFDILADLGLSEEVLSVICDDMDLDPSEQLLRIAEELGFDNDLARVVGFD

SEQ ID NO: 1763 - DNA, 1203 bp, Corynebacterium glutamicum
  CDS (101)..(1180): RXA00457
aaactctcatgttggtttcatcgtggtttcatgaggcgggatttaactagagattgttagccaatcggccagacacttcctcctagaaaggtccctcctcatgaccattgctcttgaacacccagtactgcactccacggcgatcgcgttgcctgctcgttttcaggcgagctatacgacgcgtttggtggcggtgggcgtcgataagcgtccttctgatttttggttggaaacagccggcacgccgcaggcgggcgatgtggtgattgcgcgggtgacggcgattaataatcacaagcgggtggagacgccggagtcgcgcaaggccattttgtttgagggggtgttggtgatgttggcgtatgggcaccggtatgcggcggatcagtttttagcgcatgtaccggaggatttggggccatgccatttggtggcggctggtggcatcgcgggaacggtgacggcgctgcacgatcgggtggatgaacccacagagattgaaccgttgggattgctcaccaatgcgcgcggaactgtgaatgtacgggactttgcggcttttgataatcctttgaaagtggaggctcccaacaagcgtgcgcaggtgatcgcggtgctgggaacgtcgatgaactctggaaaatccaccacgcttgcctgcttggtcaatggtttggctgcggcggggcagaaggtggcggctggaaagatcacgggcactggtgctggaaatgaccgcatgatttatcacgatgctggtgctcacagcgttattgatttcaccgactttggctacccaactacgttcaagctgaatttcgcggagattcgtgcgctgagcgtcaacatgattaatgtgctggctgattctggtgcggataccgtgatcgtggaaatcgcggacggaatttatcagggcgaaacctcgcggctgttgcgcgatcaagtgttccaggaagccgtggatcatgtggtgttctccgctgttgatgccttgggcgcgaaggccggtgtgcaggaactgcaggcggcggggcttcatgtggctgcggcctccggagtgatgacggcttcgccgctggccaccgcggaagctgccgctgtgcttgaagttccagtggtgcccacttttgatctcaccaacccggagatcgtcacagcggtgctaacggatcatgcctagcttatggcgtgctcgtcgca

SEQ ID NO: 1764 - protein, 360 aa, Corynebacterium glutamicum
MTIALEHPVLHSTAIALPARFQASYTTRLVAVGVDKRPSDFWLETAGTPQAGDVVIARVTAINNHKRVETPESRKAILFEGVLVMLAYGHRYAADQFLAHVPEDLGPCHLVAAGGIAGTVTALHDRVDEPTEIEPLGLLTNARGTVNVRDFAAFDNPLKVEAPNKRAQVIAVLGTSMNSGKSTTLACLVNGLAAAGQKVAAGKITGTGAGNDRMIYHDAGAHSVIDFTDFGYPTTFKLNFAEIRALSVNMINVLADSGADTVIVEIADGIYQGETSRLLRDQVFQEAVDHVVFSAVDALGAKAGVQELQAAGLHVAAASGVMTASPLATAEAAAVLEVPVVPTFDLTNPEIVTAVLTDHA

SEQ ID NO: 1765 - DNA, 1503 bp, Corynebacterium glutamicum
  CDS (101)..(1480): RXA00462
tgaagccttgtcattttctacatgtgcatccgctttgactaccgcccttttccgcccagtccttttagaaaccagcaacacagaaagcaagtgatcatttatggaagctattgccatactatttgtcattggggcgattcttgtcgtcgcggtcattgtcctcggtattttcttcttaacttcacgcacctggatcaaggtggctgcagctgatgaagcgctcattgtctctgcgaagaagaagggggaatcgcaggtcattgtccacggcaaagctgtggtaatgcctattacccagactcaccagaagatctctctgcgttcccgtcaggtaaatatgcaggtgacggcacaaagcgatgacaatgtcacgttgaatgtcgaggctgttgcgctggtgaagatcggttccgaagctgagtttattcgtcgcgctgcccagcgcttcgcttccagtgacaaagaaattgttcggttcacacaggatcagctggaaggtgtgcttcgtggtgtcgtggcgcagcaaacagtcacgtcgctcatgcgtgagcgtaaaaaattctccgagcagatcgctgaaacagtcatccccgagctagagaagcagggtttgattcttgactccttccagattcgtggcatcaccgatgatgtgggatacatcaaatccctcggcgcaccggaaattcaggcaaagaagcaggctgcggaaattgcagaaactgaagctgctcgtgcgatcgctaaatcacgcattgctaaccaagaggcagatctggttgaacagacccaacttgatgccaacaaggctgccgctgatgctcaggtcggtgaagcccgtgcccaggctatgcaggctgaacgccttgccgatgaaaaagctcgactagaggttcttcgccaacaggctgaaaataagcagatcgagctggaagccgaagtgaacaaggtggccgacgctgaacgctaccgccgcaagcaggaagtcgaagccgatactttcgagcaaaccaggcgcgcacaggctcaggtcgaaatcgcagaagccgaagctaccgctgcaaaggttcgtgcaatggctgaagccgaagctgttcgattgaagggacaggcagaggcagacgctatcaaggcaaaggccgaggcctaccgcgaaaaccaagaagcactactcgcccagcaagccatggaaatcctgccggaactcatgagcaacttcgcctctggatacgcaaacattggatccatgacagtgctctccggtggagaaggatccgagaattccgtgggttcacgttttgccggtgaacaagcacttggactgaaatccattattgaatcagtcaagcaaaccaccggcattgatctagctgagatcatccaaggccgtgctgctggacatgcacagggctccgctcagggtgcagcgattgctgaagcgctttcacgcgatgaaactgtggaagatcgctctgaaaaataatctagctgcccagcgcatcg

SEQ ID NO: 1766 - protein, 460 aa, Corynebacterium glutamicum
MEAIAILFVIGAILVVAVIVLGIFFLTSRTWIKVAAADEALIVSAKKKGESQVIVHGKAVVMPITQTHQKISLRSRQVNMQVTAQSDDNVTLNVEAVALVKIGSEAEFIRRAAQRFASSDKEIVRFTQDQLEGVLRGVVAQQTVTSLMRERKKFSEQIAETVIPELEKQGLILDSFQIRGITDDVGYIKSLGAPEIQAKKQAAEIAETEAARAIAKSRIANQEADLVEQTQLDANKAAADAQVGEARAQAMQAERLADEKARLEVLRQQAENKQIELEAEVNKVADAERYRRKQEVEADTFEQTRRAQAQVEIAEAEATAAKVRAMAEAEAVRLKGQAEADAIKAKAEAYRENQEALLAQQAMEILPELMSNFASGYANIGSMTVLSGGEGSENSVGSRFAGEQALGLKSIIESVKQTTGIDLAEIIQGRAAGHAQGSAQGAAIAEALSRDETVEDRSEK

SEQ ID NO: 1767 - DNA, 945 bp, Corynebacterium glutamicum
  CDS (101)..(922): RXA00463
taccacgctagtcgccagcactctcggattaagcggatgtacctccgtaacttccagtgctacgagctcccctgaaccgccgactaaagttgcggcggcaatgcagacaacgactggggagacgtcgataagcaatgaaacctcgtttaacgcctcacgcgaaacctcgctgacggcgctgggtttcttggactatcttgacgaggagcaacgcgccgccttgctcggtgaaggcctggacatcagcacgctgacctgggccaaccaggttaccgcgctgcgtgtgctggaatccctcttcaatgagcatgcatacgagctggtttctgcagtgattcagcatgtagctcaagaacctggcgataatccacaccactttctgaagttctcgcctgaaccatccaccgagaattcttgggaattgaccctggatggaccaactgtcggattgaaagtcactttcgatccggacggtcagatcactttcaaggatgctcatttgggcctgagcccagctgaggtcgttagtgtcactgaggcgttagatacctcctattcggaatcgcaaatcaaaaaagctgcggaacaactggtgggaagcctcaatccaacccagcaggcagcgctccaaggatccggtttgcgaggagcacagctcactgaagagcaaaagaccctgttcttaaagatgacctccaactggatcgaccttgccaatggcgattccggctctgaacagcaagaagaaatcgctgatacgttcagtgatacctacatcatttggaatgagcagaaagatggctcagcattcttccagatgaaaggccctgagctcgacttcagctataaagagagcgtgcctgaaaacgctgaactctctgcacggggagtccccaatattcagacctcttttcagtcaccttaactggcattggtttagtttgg

SEQ ID NO: 1768 - protein, 274 aa, Corynebacterium glutamicum
MQTTTGETSISNETSFNASRETSLTALGFLDYLDEEQRAALLGEGLDISTLTWANQVTALRVLESLFNEHAYELVSAVIQHVAQEPGDNPHHFLKFSPEPSTENSWELTLDGPTVGLKVTFDPDGQITFKDAHLGLSPAEVVSVTEALDTSYSESQIKKAAEQLVGSLNPTQQAALQGSGLRGAQLTEEQKTLFLKMTSNWIDLANGDSGSEQQEEIADTFSDTYIIWNEQKDGSAFFQMKGPELDFSYKESVPENAELSARGVPNIQTSFQSP

SEQ ID NO: 1769 - DNA, 942 bp, Corynebacterium glutamicum
  CDS (101)..(919): RXA00468
ggcagaattttgctcaagttgcctaaatcaagcacccgttcgaataagtgtccaccctttggtttattcttgaactcacttaagttttgaatttttagttgtgaaagtagttgatgcacaagtggttatggggccaacccacgctatgagcggtgcagccgtggggcttgctgttgctcaaattctcccagcagaatggggtggggttaccaccgccacggaggcttttatttatgcgggtttagcggcgggtgcagcgctgctcccggaccttgattcaccgcaggccacggtgtcgcgttcttttggtccgattacccaagtgatttcgcgttttacagagaatatttgccaaactttcgtcaatgtcaccaggggcaggaaagacaaacactgcaacaacgggcaccgcacgttgacacatacggtgtggagcgctgctgccacaggcgctggtgccacagcgctaattggcgcctatggaaaacctgcggtgattggtttgctgtttttcttcctcgggctcgccattagaggtctcatgcctgaatggtcaaagaacgcagattggcttttagttactggagcttccgctgcattagcagtgggagtatggaattatgctcccgaaagttcattcggcattgtgttaggctccgccattacagttggaagcctgacccacttggctggcgatatggccactaaggccggtatcccagcatttgccccggtcattccgctgaagggcaaacgctggtggaacctcaaattgcctaagtttttaagcattcgtgccaacggtcctgccgataagttcttactgttcgtattctcggtggcggtcatcattcagattggtttggtctcatcgggaaatatgagcaccattatgatgaatctgcttagtcctgcactgtaattaatggcagttgcgtttcg

SEQ ID NO: 1770 - protein, 273 aa, Corynebacterium glutamicum
VKVVDAQVVMGPTHAMSGAAVGLAVAQILPAEWGGVTTATEAFIYAGLAAGAALLPDLDSPQATVSRSFGPITQVISRFTENICQTFVNVTRGRKDKHCNNGHRTLTHTVWSAAATGAGATALIGAYGKPAVIGLLFFFLGLAIRGLMPEWSKNADWLLVTGASAALAVGVWNYAPESSFGIVLGSAITVGSLTHLAGDMATKAGIPAFAPVIPLKGKRWWNLKLPKFLSIRANGPADKFLLFVFSVAVIIQIGLVSSGNMSTIMMNLLSPAL

SEQ ID NO: 1771 - DNA, 1299 bp, Corynebacterium glutamicum
  CDS (101)..(1276): RXA00469
tgcccctgcgacaccaaaccatcagggaagaccctgaacgccaccttttcagggctttcccccattcacttatcagcctcaacactccacaatagagtctatgagtacttttcaggagccccaccacaaccagggattcatcccttttgcccaacctggttatgaagctccaacaccacaccttgcaactggtacttttcagcaaatgtggcagacccgccccgcacgcatccctgccaagcaaggtggtcacgccaaagtagctggtgtctgtgaaggcattggtgtgcgttatcaaatcgacccggtgctcattcgtctatttttcgtggtcactggtgtcttcggcgccggtgtcgcagcctatctcattgcatggctgtgcatgccccgctactccgttccggtctcccccatcgaagctctctggaccccgggccacaccaaagaccgcaaccacggctggtggctggtcatcgcgttctttatgttctcaggtgttttatcctccggcgctggaggaatatccggcccagcagcagccattacttacctttgccttttagccatgtggtgggcgttgcataagaaacaaccacttccaccccgcggactactcaccactgaattcactgtttctgaggatgccaccatgaaaaacgaagatctctacccacgaccccaaccagatctaagcactatcacccccgttgagggctactatgcacccttcgcgcaacaaacccccgaagcgcctcattgggatccacttgcccaaaaccaatacaacacctgggatgtacaagtccctccacaaaagcctcagaaaaagcgccatgtgtggccatggattgtcggcggtgtagttggtaccggagttgtcatgagcgccctcgcaggcctgtttatttcaaatatcgatcccatctactttgaagacgaccctggaatcggcgatgtcaatctcatccccaccaacgatgaactcctcagcagctacacctctggtgtgggcgaaatgaacctagatttcagcaacctcacccaacttgatcaggaacaaaacgttcaaatcacctcaggtatcggtgaagtcatggtgaccctgcctgatgacgtgccagtaagcttgagttgctccgccggtgtgggcacagcgcgctgtgatgttggagacctcgccgcccacaatgctgatttggaaggtccgatgttgaatctggttgtaaattctggaatcggcgatgtgaaggtggagttcgctgatcagaatgactagcccgaccctatgtgagtagt

SEQ ID NO: 1772 - protein, 392 aa, Corynebacterium glutamicum
MSTFQEPHHNQGFIPFAQPGYEAPTPHLATGTFQQMWQTRPARIPAKQGGHAKVAGVCEGIGVRYQIDPVLIRLFFVVTGVFGAGVAAYLIAWLCMPRYSVPVSPIEALWTPGHTKDRNHGWWLVIAFFMFSGVLSSGAGGISGPAAAITYLCLLAMWWALHKKQPLPPRGLLTTEFTVSEDATMKNEDLYPRPQPDLSTITPVEGYYAPFAQQTPEAPHWDPLAQNQYNTWDVQVPPQKPQKKRHVWPWIVGGVVGTGVVMSALAGLFISNIDPIYFEDDPGIGDVNLIPTNDELLSSYTSGVGEMNLDFSNLTQLDQEQNVQITSGIGEVMVTLPDDVPVSLSCSAGVGTARCDVGDLAAHNADLEGPMLNLVVNSGIGDVKVEFADQND

SEQ ID NO: 1773 - DNA, 984 bp, Corynebacterium glutamicum
  CDS (101)..(961): RXA00472
gtctaaacgctcccgtgctttcgccacagcattaatcgccttgggcctagggctatcttcctgctctactacggaagataccgctatatcggagacgacagtgtctagtgttgcaacgaaaacaacctcgactctgcctgaaatgaactccgcagtatcagcagacggcgtgacgatcactatcgattctgccttcacgacagactctgtagaaatggaatccctagacagaccttctggcgacatccaacccgagatgtctagagaagacggaatctttgtcgtagtcgaaaccactataaagaacgagagtggagcagatatggacatcacctgtgcatccactggttcaactgtctatgcagaaatctccactaatcaagaggccgtataccaaccaatacgcgatttattcctcatcccaggaaacccggaatgcaaccataatctaggatccggtttcgacgcaccaatgacttgggtatttcaaatccctaaagatgccactgcggagcgatttggattcacacatagtgagctcggtgatgggaaactaacttggattgcactcaatgatttgagtaattcggagccagctactgaatcaactatgcgagacgaagcagcaatcgatccgagcacccctcagcaaactccagtacaggaaactgtgatctcacaaaacaccattgaaactcctgtagcccctgctcctgcggtacctgcttatggcgcttcttgccctgtctcgatgctccagcagccaagtcaagctgcagatggttcagctttggtctgcatttatgcaggaacccccaacccaatctgggtctacggcccagaacctctcggagtcgggactgctacaccgggtggggcatgcgaaggatacgaggccggtgggcaagatgcttctggaaatataatgatgtgctcaggcggacaatgggtctatgggccataaatctaaaatcaaagagtgca

SEQ ID NO: 1774 - protein, 287 aa, Corynebacterium glutamicum
VSSVATKTTSTLPEMNSAVSADGVTITIDSAFTTDSVEMESLDRPSGDIQPEMSREDGIFVVVETTIKNESGADMDITCASTGSTVYAEISTNQEAVYQPIRDLFLIPGNPECNHNLGSGFDAPMTWVFQIPKDATAERFGFTHSELGDGKLTWIALNDLSNSEPATESTMRDEAAIDPSTPQQTPVQETVISQNTIETPVAPAPAVPAYGASCPVSMLQQPSQAADGSALVCIYAGTPNPIWVYGPEPLGVGTATPGGACEGYEAGGQDASGNIMMCSGGQWVYGP

SEQ ID NO: 1775 - DNA, 1701 bp, Corynebacterium glutamicum
  CDS (101)..(1678): RXA00474
gtgtgcgcagcggaaaagtcctgatcagtaggcctcaggatgcagcattgcttgagcctgaacagccaacaacgttgcgggcggtcccatgacgcgggtgatggcattgtggtttccggattggcctgtgcaggcggttcatttggatgaagatgctcccgcgcacaataaacctgtggcgattgctgcgcattaccgcatccaggtgtgtggcgtggctgcgcgcaagcgtggggtgcgtcgtgggatgaaggttcggcaggcgcaggctgtgtgccctgagctggaggttgttgacgcggatgcagatcgtgatgcccggatgtttgagggcatcgtggcatcgctcggtgaggttgcctccagcgtcgaggtgcttcgtccgggtctggtcgcggtcgatgcgggagctgccgcgcgctattacggttcagaggacatcgctgctcagatgcttatcgacgccgccctgcgccaaggcatcgacgttttcgccggggttgcggatgagatcacgacggccgtcatcgcggcgagggcgaatggtgggactgtggtgaagagggaggcgtcgagaagctttttacagcagcaacccctgggcgtgctggcggccgaggaagcgctgggttgtgaggcggaggtggtgcgcgcgctggcggatctgggcatgcgcacgcttggtgagctggcggaactgccggtagaagccgtggcgacgcgtttcggcaacgctggtctgcggtgtcacaacattgcgcgtgccaggcacgatcgtaaggtcgcgccaccgatcacgcatgcagattgggaggtttcgcatgtgccggaggagcctattttgcgtgtcgacgccgcctcgtttgttgcgcgcaaccttgcctcgcgcctgcatcaactgctgagcaaaggtggcgtggtgtgccaattgctcaaggtcacagccgatttcagtactggtgatacggtgagcagaatttggcgtaccggtgaacctttaacggaacaggcaactgcggatcgggtgcgttggcagttggatgggtggttgactgcgcgcggtgtgcattccgatgatccgaatgagcacgatgggattacggcgttgtggcttattcctttggaatgtgtgccaccggatatggccagcggcggattgtgggataccgggcgcagccagcagcatgtggccagacaagtcattgagcgtgtgcaatcaagcttgggcgtggatgcggtgctgcagcctgttccggctggtggtcggggagtagaagaacgcattcattttgttccctatggtgaaaaacgtgatgctatccgcaatccagcggggtcgtggccagggaaaataccaggtccgctgcctgctcggttgggcggtgggatcaaccacccggcctcgcaagtgaccatgattgatacagaagggcagcgtatttacgtcaccgcagaggcattgctcagctcgtcgccgtatgccttgtcctgggggccggcccgctatttgatcactggctgggctgggccatggccggtggatgatcgatggtgggagaaaaacggcacaaaatatgcccgcctccaagtggtgggacgggcagtatctgaagaaaggcagctcaatgcgtggctgttgatgtggaaagacaacaagtggcggattgaggccacatattaggaaactactgcgctaaaaca

SEQ ID NO: 1776 - protein, 526 aa, Corynebacterium glutamicum
MALWFPDWPVQAVHLDEDAPAHNKPVAIAAHYRIQVCGVAARKRGVRRGMKVRQAQAVCPELEVVDADADRDARMFEGIVASLGEVASSVEVLRPGLVAVDAGAAARYYGSEDIAAQMLIDAALRQGIDVFAGVADEITTAVIAARANGGTVVKREASRSFLQQQPLGVLAAEEALGCEAEVVRALADLGMRTLGELAELPVEAVATRFGNAGLRCHNIARARHDRKVAPPITHADWEVSHVPEEPILRVDAASFVARNLASRLHQLLSKGGVVCQLLKVTADFSTGDTVSRIWRTGEPLTEQATADRVRWQLDGWLTARGVHSDDPNEHDGITALWLIPLECVPPDMASGGLWDTGRSQQHVARQVIERVQSSLGVDAVLQPVPAGGRGVEERIHFVPYGEKRDAIRNPAGSWPGKIPGPLPARLGGGINHPASQVTMIDTEGQRIYVTAEALLSSSPYALSWGPARYLITGWAGPWPVDDRWWEKNGTKYARLQVVGRAVSEERQLNAWLLMWKDNKWRIEATY

SEQ ID NO: 1777 - DNA, 783 bp, Corynebacterium glutamicum
  CDS (101)..(760): RXA00475
ggggtgtctgtaattttcacgtctcctggcgtttttaagacgaattacaacaattcgttcacgattgagcgaaattgggcgtcttgcttaggtttcgggggtgacccagggttacggtgtgtgcatgattgtgcagccaacttctcattcaaagcatcgtgcccgcctgaagactctagcgattgtcggcgctagcgcgttgactcttgcgggttgtggaacctccaattccaccaccaacgatgcttcttctgtaacccaaactatgtccgcaactgcggatggcgcacagttgtccaacgaagcttccaccggcccaaccgcattgggcgaagccgatgtagcaatgaagactctccgacctgatgcgcctgcacagctcatggtcaccgatgttcggattggctctcacagtggctttgaccgcgtggtatttgatctcactggcaccggaactcctggttggttcattgattacacctccaatcccacccagcagggcagcggaaacaccatcaacttcacgggcgatacagcgctgaacgtaaatattgacggtactgtttatcctttcgatttgggccttgaggatccagagatcggcaccgtggatggctccggcagcattgtcacccaggtcgtcagcgcaggtacttttgagggacgctcccagttcgtcatcggcctcaacggcaagcaccgctactcggtcactgagttgcaggatccgcaccgtctcgttgtggatgttttagcgcagtagtttcctaatatgtggcctca

SEQ ID NO: 1778 - protein, 220 aa, Corynebacterium glutamicum
VTQGYGVCMIVQPTSHSKHRARLKTLAIVGASALTLAGCGTSNSTTNDASSVTQTMSATADGAQLSNEASTGPTALGEADVAMKTLRPDAPAQLMVTDVRIGSHSGFDRVVFDLTGTGTPGWFIDYTSNPTQQGSGNTINFTGDTALNVNIDGTVYPFDLGLEDPEIGTVDGSGSIVTQVVSAGTFEGRSQFVIGLNGKHRYSVTELQDPHRLVVDVLAQ

SEQ ID NO: 1779 - DNA, 984 bp, Corynebacterium glutamicum
  CDS (101)..(961): RXA00476
gtgaacgaattgttgtaattcgtcttaaaaacgccaggagacgtgaaaattacagacaccccagacatcagatggaggcggcgatactagggtagaggacatgactcttcgctgttctgacgtcaatgttgaacccctgccgggaacggcaaaaacaggttctgggtttgttctccttgaacatgctggctcgtggagccgtgatgttttagacggcggaacatttgatcctgagttgactgatcaattgaagaggcacctgaaagcttccggaatgggtctgcaattaattaggaagccgggaagggagggtcgaaacgtcgaaaagcataatctttttctcgtttttgctgaggcctcaattattgagcacctggtggtggacgcgccggctgatgttttggatcttgatttaagcgggccgggcaaaaacaatgcgcagcgcatggatgatccgatgctgctgatttgtacgcattcgaagcgcgatgtgtgctgcgcgatcaaggggcgtccgctggcagctgccgtggagccacaatttgggccgctgcatgtgtgggaggcttcgcacaccaagggccaccgttttgcgccatcgatgctgctcatgccgtggaattactcttatggcctacttgatgaggccgaaaccgtgcagcttttccaaggcgcgttggacaacaaactcttcctgccgggcaaccgtggccgaggaaccttagatgctcgtggccaggttgcagaaattgccgtggcggaagctttcggcgaggcggttgctcctgcgagtttgcaggttgaattcgaagatgattctgttttggttactcatcccgatgggcgcacgtgggttgtggagcttgaacgcatcgaggtcgacggcgtggtgtcctcgtgtggtgatcagccgaaaactggaaaagcgtgggtggctaggcaagttacagaactgatcggataaaagcagagttatatctgatg

SEQ ID NO: 1780 - protein, 287 aa, Corynebacterium glutamicum
MTLRCSDVNVEPLPGTAKTGSGFVLLEHAGSWSRDVLDGGTFDPELTDQLKRHLKASGMGLQLIRKPGREGRNVEKHNLFLVFAEASIIEHLVVDAPADVLDLDLSGPGKNNAQRMDDPMLLICTHSKRDVCCAIKGRPLAAAVEPQFGPLHVWEASHTKGHRFAPSMLLMPWNYSYGLLDEAETVQLFQGALDNKLFLPGNRGRGTLDARGQVAEIAVAEAFGEAVAPASLQVEFEDDSVLVTHPDGRTWVVELERIEVDGVVSSCGDQPKTGKAWVARQVTELIG

SEQ ID NO: 1781 - DNA, 708 bp, Corynebacterium glutamicum
  CDS (101)..(685): RXA00481
gtccataaaaataatgtgcctacaagaaatttatagtatcccatgagttaatatttttaaaaataaactttatctgactttgtagaaaaaggtgattactatgctgaatatgcaggaaccagataaaatccatccggcagaacctacacttcgtaatatttatgacgttaaaactagtgatcccaaaagtgaattagttgatcgttctggcatgtcggaagaagacattgcgcaaattgggcggctaatgaaatcgttggccagtcttcgcgatgtggaacgtagtattggtgaagcctcggcacgttatatggagctaagtgcccctgatatgcgagctttgcactatttgattgtggcgggcaatgcgggcgaagtggtgactccaggaatgcttggagctcaccttaagctttccccggcatctgtaacaaagacgcttaataggctagaaaaaggtgggcatattgttcgtaatgtgcaccccgtcgaccgcagggctttcgccctcatggtcactgatgccactcgtggagaggcgatgcggacgcttggtaagcatcaggcgcgtcgttttgatgctgctaaacgattaactccacaagagcgtgaagtggttatccgattccttcaggatatggcacaggagttatcccttaataatgcaccatggctcaacacggagtagatgaccatctacgttaatta

SEQ ID NO: 1782 - protein, 195 aa, Corynebacterium glutamicum
MLNMQEPDKIHPAEPTLRNIYDVKTSDPKSELVDRSGMSEEDIAQIGRLMKSLASLRDVERSIGEASARYMELSAPDMRALHYLIVAGNAGEVVTPGMLGAHLKLSPASVTKTLNRLEKGGHIVRNVHPVDRRAFALMVTDATRGEAMRTLGKHQARRFDAAKRLTPQEREVVIRFLQDMAQELSLNNAPWLNTE

SEQ ID NO: 1783 - DNA, 725 bp, Corynebacterium glutamicum
  CDS (1)..(702): RXA00486
catgcgatcatggcagcagtcgaccatgcccgcgcagccgttctagattcgctgtctgaagtgtccggaacgttgaaagtcacctccttccaatccctgctgttcacccttgccccgaaagccatcgcgcgcctgaccgagaaatacccacacctgcaagtagaaatctcccaactagaagtcaccgcagcgctcgaagaactccgcgcccgccgcgtcgacgtcgcactcggcgaggaataccccgtggaagtcccccttgttgaggccagcattcaccgcgaagtcctcttcgaagaccccatgctgctcgtcaccccagcaagcggcccatactctggcctcaccctgccagaactccgcgacatccccatcgccatcgatccacccgaccttcccgcgggcgaatgggtccataggctctgccggcgcgccgggtttgagccccgcgtgacctttgaaaccagcgatcccatgctccaagcacacctcgtgcgtagcggcttggccgtgacattttcccccacactgctcaccccgatgctggaaagcgtgcacatccagccgctgcccggcaaccccacgcgcacgctctacaccgcggtcagggaagggcgccaggggcatccagccattaaagcttttcgacgagccctcgcccatgtggccaaagaatcttatttggaggctcgtctagtagagtgagttcttgtgagccttcagac

SEQ ID NO: 1784 - protein, 234 aa, Corynebacterium glutamicum
HAIMAAVDHARAAVLDSLSEVSGTLKVTSFQSLLFTLAPKAIARLTEKYPHLQVEISQLEVTAALEELRARRVDVALGEEYPVEVPLVEASIHREVLFEDPMLLVTPASGPYSGLTLPELRDIPIAIDPPDLPAGEWVHRLCRRAGFEPRVTFETSDPMLQAHLVRSGLAVTFSPTLLTPMLESVHIQPLPGNPTRTLYTAVREGRQGHPAIKAFRRALAHVAKESYLEARLVE

SEQ ID NO: 1785 - DNA, 1026 bp, Corynebacterium glutamicum
  CDS (101)..(1003): RXA00490
gattgagcacgacacctccaaaattgttcagtattacttaactatagttggctgtttttcgatctagtccttaaaggtttctttggcaataatcaagggcatgaataaacagtccgctgcagtgttgatggtgatgggttccgccctatccctgcaatttggtgctgccattggaacgcagcttttccccctcaacggcccctgggctgtcacctctttaaggctgttcatcgcaggcttgatcatgtgcctggtgatccgcccgcgacttcgttcctggactaaaaaacaatggatcgccgtgctgctgttgggattatctcttggcggaatgaacagcctgttttacgcatccatcgaactcatcccgctgggtaccgccgtgaccattgagttcctcggccccctgattttctccgcggtgttagcccgcacgctgaaaaacggattgtgcgtggctttagcgtttctcggcatggcactactgggtatcgattccctcagcggcgaaacccttgacccactcggcgtcattttcgcagccgtcgcaggaatcttctgggtgtgctacatcctggcatcaaagaaaatcggccaactcatccccggaacaagcggcctggccgtcgcactgattatcggcgcagtggcagtatttccactgggtgctacacacatgggcccgattttccagaccccaaccctactcatcctggcgcttggcacagcacttctcgggtcgcttatcccctattcgctggaattatcggcactgcgccgactccccgcccccattttcagtattctgctcagcctcgaaccggcattcgccgccgccgtcggctggatcctgcttgatcaaacccccaccgcgctcaagtgggccgcgatcatccttgtcatcgcggccagcatcggcgtcacgtgggagcctaaaaagatgcttgtcgacgcgcccctccactcaaaatgcaacgcgaagaggcgagtacacacacctagttaacgtgcaggcttaccttttgg

SEQ ID NO: 1786 - protein, 301 aa, Corynebacterium glutamicum
MNKQSAAVLMVMGSALSLQFGAAIGTQLFPLNGPWAVTSLRLFIAGLIMCLVIRPRLRSWTKKQWIAVLLLGLSLGGMNSLFYASIELIPLGTAVTIEFLGPLIFSAVLARTLKNGLCVALAFLGMALLGIDSLSGETLDPLGVIFAAVAGIFWVCYILASKKIGQLIPGTSGLAVALIIGAVAVFPLGATHMGPIFQTPTLLILALGTALLGSLIPYSLELSALRRLPAPIFSILLSLEPAFAAAVGWILLDQTPTALKWAAIILVIAASIGVTWEPKKMLVDAPLHSKCNAKRRVHTPS

SEQ ID NO: 1787 - DNA, 543 bp, Corynebacterium glutamicum
  CDS (101)..(520): RXA00491
tcctcatagtgtgtccacaattatctaaactttagtagcttgtccttaaatcggataaccgctgcagctcacacgctattccacaaccggaaatctggcagtgtattgggttttagcaacctctgccaatagggtggaagatgtgaactttgatgcgatgatgccccgcgacccgtttgccgatgatcccaatgacccggcatcgtttattaccgacgatgacccttatgatcatcccgaaccgctttctgaagaagagcgaatccacgtgagccaagaccttcgcctcgtgatggaatttaaaaaagttttaggtccccgaggaatcgaaggcgtgttcttcatgtgcgaagactgcgaagagttccactactacgactgggacatcatggcagcaaacatgcgcgccaccttggctggggaactcagccccgtgcatgaaccaagtgcgcaacccaatattgatgcctatgtgccgtgggactactgcattggttacctagacggacttgaagccaaataaaaactgctagcaactaaaga

SEQ ID NO: 1788 - protein, 140 aa, Corynebacterium glutamicum
VYWVLATSANRVEDVNFDAMMPRDPFADDPNDPASFITDDDPYDHPEPLSEEERIHVSQDLRLVMEFKKVLGPRGIEGVFFMCEDCEEFHYYDWDIMAANMRATLAGELSPVHEPSAQPNIDAYVPWDYCIGYLDGLEAK

SEQ ID NO: 1789 - DNA, 347 bp, Corynebacterium glutamicum
  CDS (1)..(324): RXA00493
ttcgaaggcgaccagaaggtcggcgttcgcgcactggctactgctttgggcaagccagcgtactggatcgcctccaacgcaggtcttgacggctctgttgttgttgcacgcactgctgctctgccaaacggcgagggcttcaacgctgcaactttggaatacggaaacctgatcaacgacggtgtcatcgacccagtcaaggtcacccattccgcagtagtgaatgcaacctctgttgcacgcatggttctgaccactgaggcttctgttgttgagaagcctgcagaagaagcagccgatgcacatgcaggacatcatcaccactaaagttctgtgaaaaacaccgt

SEQ ID NO: 1790 - protein, 108 aa, Corynebacterium glutamicum
FEGDQKVGVRALATALGKPAYWIASNAGLDGSVVVARTAALPNGEGFNAATLEYGNLINDGVIDPVKVTHSAVVNATSVARMVLTTEASVVEKPAEEAADAHAGHHHH

SEQ ID NO: 1791 - DNA, 536 bp, Corynebacterium glutamicum
  CDS (1)..(513): RXA00519
atggctggcggcggactgttcgagaccggtgctggtggatctgctcctaagcacgtccagcaggttcaggaagaaaaccacctgcgttgggattccctcggtgagttcctcgcactggctgagtccttccgccacgagctcaacaacaacggcaacaccaaggccggcgttctggctgacgctctggacaaggcaactgagaagctgctgaacgaagagaagtccccatcccgcaaggttggcgagatcgacaaccgtggctcccacttctggctgaccaagttctgggctgacgagctcgctgctcagaccgaggacgcagatctggctgctaccttcgcaccagtcgcagaagcactgaacacaggcgctgcagacatcgatgctgcactgctcgcagttcagggtggagcaactgaccttggtggctactactcccctaacgaggagaagctcaccaacatcatgcgcccagtcgcacagttcaacgagatcgttgacgcactgaagaagtaaagtctcttcacaaaaagcgc

SEQ ID NO: 1792 - protein, 171 aa, Corynebacterium glutamicum
MAGGGLFETGAGGSAPKHVQQVQEENHLRWDSLGEFLALAESFRHELNNNGNTKAGVLADALDKATEKLLNEEKSPSRKVGEIDNRGSHFWLTKFWADELAAQTEDADLAATFAPVAEALNTGAADIDAALLAVQGGATDLGGYYSPNEEKLTNIMRPVAQFNEIVDALKK

SEQ ID NO: 1793 - DNA, 1212 bp, Corynebacterium glutamicum
  CDS (101)..(1189): RXA00528
ttctgctgggaatccccacattttggaacgtagcgtcgataagcgtgcggcgaagctttttcggtcgcggccgttatctttttaagaggagaaattttagatgagcacgtccaccatcagggttgccattgccggagtcggaaactgcgcgacctccctcattcagggtgtggaatattaccgaaatgcggatccttccgaaactgtcccgggtttgatgcacgtcaaattcggtgattaccacgttggcgacattgaattcgtggccgcgttcgacgtcgacgccgaaaaagtaggcatcgatcttgccgacgccaccgaggcttcacaaaactgcactatcaaaatcgccgatgtcccacagaccggcatcaacgtgctgcgtggcccgactctcgacggcctgggcgatcattaccgcgcgaccatcgacgagtccaccgccgagccagtcgacgttgtccaggcgcttatcgacgcaaaagccgatgttttggtgtcctacctcccagtgggctccgaagaagccgacaaattctacgcacaagccgccatcgatgcaggctgcgcctttgtcaacgctctcccagtattcatcgcctccgaccctgagtgggctaagaagttcactgacgctggcatcccaattgttggcgatgacatcaaatcccagatcggtgcaaccatcacccaccgtgtcctcgcacgcctttttgaagaacgtggcgttcgcgtagatcgcaccatgcagctcaacgtcggcggcaacatggacttcaaaaacatgcttgaccgcaatcgcttggaatccaagaaggtctccaaaacccaagcagtgacctccaacattccagatggtccactgtctggaaaggtggaagaccgcaacgtccacatcggaccatccgaccacgtccaatggctcgatgaccgcaagtgggcttatgtccgcctcgaaggcaccgcattcggtggagttcccctcaaccttgagtacaaactcgaggtgtgggattcacccaactctgccggcatcatcatcgacgctgttcgcgccgccaagatcgccctcgatcgcggtatcggcggaccgatcatgccagcaagctcctacctgatgaagtccccacctgagcagcttccagacgatgttgcttgtgaacgcctagaggcattcatcatcgaggcgtaaaattaggctaaaaatttggg

SEQ ID NO: 1794 - protein, 363 aa, Corynebacterium glutamicum
MSTSTIRVAIAGVGNCATSLIQGVEYYRNADPSETVPGLMHVKFGDYHVGDIEFVAAFDVDAEKVGIDLADATEASQNCTIKIADVPQTGINVLRGPTLDGLGDHYRATIDESTAEPVDVVQALIDAKADVLVSYLPVGSEEADKFYAQAAIDAGCAFVNALPVFIASDPEWAKKFTDAGIPIVGDDIKSQIGATITHRVLARLFEERGVRVDRTMQLNVGGNMDFKNMLDRNRLESKKVSKTQAVTSNIPDGPLSGKVEDRNVHIGPSDHVQWLDDRKWAYVRLEGTAFGGVPLNLEYKLEVWDSPNSAGIIIDAVRAAKIALDRGIGGPIMPASSYLMKSPPEQLPDDVACERLEAFIIEA

SEQ ID NO: 1795 - DNA, 666 bp, Corynebacterium glutamicum
  CDS (101)..(643): RXA00529
gcaaagctttgtaccggaagcgttaaggcactggattttgtcgagcagtttcaggctgtttagcgggcgagttcttatagagatgtataaggtgaagctcatgaagttgaagtggattgcaccaattcttccggttttggcccttgcaggctgcggaaactacgtcaacgtagagtcgcaagggaaatctggaatttcccatgatgaggacggaaatataagcgttcacatgtacatctgtggtgataatgcggtggatgaactgatacttagcggtggtttttacgatggcccacctgggacaaacaacccagcccttgggatgttgaaaacttccaaccctgagtcgggttatgttgtagtcaacatcgctgatccagcaccgtgggaagttgttgagccaatcaatttgcccacggaacagggaaagtacattattgccaatccgaggttggtagataaaggttggccgattcctttcgcaaaagaaaagtatatgccgagtgtttccacatcagtaggaatgcttgaaggaatagatccaggtctagtcatgcgggatatgtataccgagtcgactcatgtgttcggtactgccgaagactttgttgaagccggtcaacagtggtgcgaggattatttctaaaacgtgaatctggcaaaaga

SEQ ID NO: 1796 - protein, 181 aa, Corynebacterium glutamicum
MKLKWIAPILPVLALAGCGNYVNVESQGKSGISHDEDGNISVHMYICGDNAVDELILSGGFYDGPPGTNNPALGMLKTSNPESGYVVVNIADPAPWEVVEPINLPTEQGKYIIANPRLVDKGWPIPFAKEKYMPSVSTSVGMLEGIDPGLVMRDMYTESTHVFGTAEDFVEAGQQWCEDYF

SEQ ID NO: 1797 - DNA, 1404 bp, Corynebacterium glutamicum
  CDS (101)..(1381): RXA00530
ggcgataagcctcctccctggggccttgcccatttcatagggtgtccaggtaatgtttcaggggttagatttcagctgaagcaactggggagttggcgctatgagcatcggattcgaccgcgacctttatattaagatgcagtcgcagcacatcaatgagcgccgcgagcagatcggcggcaagctgtatctggaaatgggcggcaagcttttcgacgacatgcacgcttcccgtgtgctgccaggtttcacgcctgacaacaagatcgctatgctcactgagcttaaagatgagctggaaatcctcgtcgcaatcaatgcgaaggatctggagcgcaagaaaacccgcgccgacctcgacatttcttatgaggaagatgttttacgcctcattgatgtgttccgtgagctgggctttttggcggagcatgtggtgctcacacagttggaggatgacaactatcaggcactcgcgttcaagcagcgcctagagcgccttggcctgaaggttgctgttcaccgcgtgattccaggttacccaactgatgctcgccgcattgttagcgaggaaggtttcggcatcaacgagtatgtggaaaccacccgcaatttggttgttgtgaccgcaccgggcccaggttctggaaagctcgctacctgcttgagccagatttatggcgatcaccagcgcggaatcaagtccggctacgcaaagtttgaaactttccccatttggaacctgcctcttgagcacccagttaacttggcttatgaggctgccacggcagatctcgatgacatcaacatcatcgatcctttccacctcgccgcctatgacaccaaagccaccagctacaaccgcgacgtggaagtcttcccgctgctgaaaaccatgctggaaatgctgtcgggctcatcgccgtacaaatcccccaccgacatgggtgtcaacatggtcggaagcgcaattatcgacgacgccgcgtgccaggaagccgcccgccaagaaattgttcggcgttacttcaaggcgcttgtcgacgagcgtcgcgaggagcaggacgataccatttcagcgcgcatcgccattgtcatgagcaaggccggttgcaccgttgaagaccgccgcgtggttgcccgagcacttgatgttgaagaatccaccggcgcgccgggttgtgccattgaacttaacgatggtcgactcgtcaccggcaagacttcagaacttctcggatgctccgcagcgatggtgcttaatgcactgaaggaactcgctggcattgatcgcagcgtggatctcctctcccctgaatccatcgagccaatccaatcgctgaagacccagcacctgggatcccgcaacccctcgcctgcacactgatgaagtgcttattgctttgt

SEQ ID NO: 1798 - protein, 427 aa, Corynebacterium glutamicum
MSIGFDRDLYIKMQSQHINERREQIGGKLYLEMGGKLFDDMHASRVLPGFTPDNKIAMLTELKDELEILVAINAKDLERKKTRADLDISYEEDVLRLIDVFRELGFLAEHVVLTQLEDDNYQALAFKQRLERLGLKVAVHRVIPGYPTDARRIVSEEGFGINEYVETTRNLVVVTAPGPGSGKLATCLSQIYGDHQRGIKSGYAKFETFPIWNLPLEHPVNLAYEAATADLDDINIIDPFHLAAYDTKATSYNRDVEVFPLLKTMLEMLSGSSPYKSPTDMGVNMVGSAIIDDAACQEAARQEIVRRYFKALVDERREEQDDTISARIAIVMSKAGCTVEDRRVVARALDVEESTGAPGCAIELNDGRLVTGKTSELLGCSAAMVLNALKELAGIDRSVDLLSPESIEPIQSLKTQHLGSRNPSPAH

SEQ ID NO: 1799 - DNA, 840 bp, Corynebacterium glutamicum
  CDS (101)..(817): RXA00535
aatcgcatggggcaccgtggtcagacaccggatcgcgctccgcaccccaaaagatggctccctaaggagctcacctttactcaatgctctgatgacaccgatgtggtgggcaggcatgagtaccgcgatgctggcatatttcttacaaacagtagcacttggtttcggcaccctcttggtagtgcaaccagtgcttgtcctgtcgctgatgttcacgctgccgctctcagcacgattcaatggctaccgactacgccgaactgaaatcttctgggctaccctcctcaccgtagccgtgggcatcatgatcgttttgggacgcccccttcccggaaacccccaccccccactcgatcgatggattccagtacttttagtcggcgttgcagtaatgggtggaatgtggctgcttgcggaatacgtattaaagaaggacaaagccctcatccttggtcttgtgacgggtgcattgtttggctacgtagcagtgatgtccaaagccgcggtggatctttttgtccatcaaggcataacgggactcatcttgaactgggaaggctacggcctaatcctcaccgcattacttggaacaatcgtgcagcagtattcctttaacgctggcgaactacaaaaatcgctacccgccatgaccattgccgaaccaattgttgccttcagtttgggctacttggttctgggcgaaaaattccaagtcgtggactgggaatggatcgccatgggcatcgcactactggtgatgattgtttccaccattgcactgtctcgtacaagcacaatgccggccggatcgaaaaggtaaaactccaaagttccccccga

SEQ ID NO: 1800 - protein, 239 aa, Corynebacterium glutamicum
MWWAGMSTAMLAYFLQTVALGFGTLLVVQPVLVLSLMFTLPLSARFNGYRLRRTEIFWATLLTVAVGIMIVLGRPLPGNPHPPLDRWIPVLLVGVAVMGGMWLLAEYVLKKDKALILGLVTGALFGYVAVMSKAAVDLFVHQGITGLILNWEGYGLILTALLGTIVQQYSFNAGELQKSLPAMTIAEPIVAFSLGYLVLGEKFQVVDWEWIAMGIALLVMIVSTIALSRTSTMPAGSKR

SEQ ID NO: 1801 - DNA, 366 bp, Corynebacterium glutamicum
  CDS (101)..(343): RXA00540
tctccctatctaagggctggctaggtttgaccagtggcaacagttacacttgtgctcgtaaaacattgtcctccccatttcttgagtaagggaaaataccgtggcccgtgtagttgtcaatgtcatgcctaaggctgagattctggatccccaggggcaggcggtacaccgcgccctcggacgtatcggagtttctggcgtttccgatgtccgtcagggaaagcgcttcgagcttgaggtagatgattccgtcaccgaagctgacctaaagaaaattgctgaaaccctcctcgcaaacaccgtcatcgaagacttcgatgtggtgggagttgaggtcgcgaagtgagcgccaaaatcggtgtcatt

SEQ ID NO: 1802 - protein, 81 aa, Corynebacterium glutamicum
VARVVVNVMPKAEILDPQGQAVHRALGRIGVSGVSDVRQGKRFELEVDDSVTEADLKKIAETLLANTVIEDFDVVGVEVAK

SEQ ID NO: 1803 - DNA, 519 bp, Corynebacterium glutamicum
  CDS (101)..(496): RXA00549
attcgtttgcagcaggatctggaaaatggttcacaggatactgcggacatggcgcatgctttgggtatcgcgaagtctttgccaactatccctgagacacttgactgaaaacggagagaccccttatgagggcatcatcttgggtcagtatgagtcccgcccacttgatatggcttctgcgatggcaactatcgctaatgaaggtgtctggcaccgcccgcacttcgtgtccaaggtggagactgtcagcggtgaggttctctacgagttcgaggatggcgacggcgagcgtcgtgtttctgaaaaggttgcactgaatctgctcaaggccatggggccaatcgctgcatactccaacggaaacgctctggctgatggccaggtttctgcatccaagactggtaccactcagcttggtgataccggtgcaaacaaggatgcgtggatgttgggtgcggcacctcagctagctactgcggtgtgggtcggaactgcttgataacactgcattgtataaca

SEQ ID NO: 1804 - protein, 132 aa, Corynebacterium glutamicum
LTENGETPYEGIILGQYESRPLDMASAMATIANEGVWHRPHFVSKVETVSGEVLYEFEDGDGERRVSEKVALNLLKAMGPIAAYSNGNALADGQVSASKTGTTQLGDTGANKDAWMLGAAPQLATAVWVGTA

SEQ ID NO: 1805 - DNA, 444 bp, Corynebacterium glutamicum
  CDS (101)..(421): RXA00550
aaggatgcgtggatgttgggtgcggcacctcagctagctactgcggtgtgggtcggaactgcttgataacactgcattgtataacacctggggtggcagtatgtatggttctaactcccctgccacgatctggaagcagaccatggataacgccctcgagaactcccctctcgaaacttgggatatcgctccagcattggggtacggtaacccaccagttccggaatatgtgtggactccaagtccaaacatcgcgactaatgatccagaaggagcaaccgaggaagctccagtggaggatccaaatgcagtaatcgatacccctgctgtagatcccactgcacctgcagaggagaccggtaacggtcaggtagaaatcctgccggggctgactatcccgggagatctcttagggatcggctaaaatccggtcgtagcctaaac

SEQ ID NO: 1806 - protein, 107 aa, Corynebacterium glutamicum
MYGSNSPATIWKQTMDNALENSPLETWDIAPALGYGNPPVPEYVWTPSPNIATNDPEGATEEAPVEDPNAVIDTPAVDPTAPAEETGNGQVEILPGLTIPGDLLGIG

SEQ ID NO: 1807 - DNA, 444 bp, Corynebacterium glutamicum
  CDS (101)..(421): RXA00553
gtcattgcaagcgcgaacgctgtgcagcaattgctgcggatttcgctgagcaaggaattgatccgctcgttacttcttaaaaagggtatggtggctgggtatgagcatcgttaagatcaacgcaatttccgtacccgaaggcgctggtgaagagcttgagaagcgcttcgcagcccgccaaaatgccgtggattccgctccgggatttgagggctttcaactgttacgccctgtttccggtgaagaccgctactttgtagtcacccagtgggctgatgaagacagctataacgcgtggcgtgatgccgaaaaggccaagggcggtcatggccagggagcccacggctcagataagaagcctgtcgcttccggcgcttccctgctggagttcgaagtagtcctaggatctaccggcgctaagtagggaaagagaaaagtcggaac

SEQ ID NO: 1808 - protein, 107 aa, Corynebacterium glutamicum
MSIVKINAISVPEGAGEELEKRFAARQNAVDSAPGFEGFQLLRPVSGEDRYFVVTQWADEDSYNAWRDAEKAKGGHGQGAHGSDKKPVASGASLLEFEVVLGSTGAK

SEQ ID NO: 1809 - DNA, 594 bp, Corynebacterium glutamicum
  CDS (101)..(571): RXA00554
atccgaaactctcctgtaccgaccatcatttatcccggtctttaggctctccaacagcagaggactagacttaagtatgcctgcaaaggaggacaacttcatgaacacccaaccagagcatccagaaaatgatctagtcgacgaagccgatttttctaaccggcccaggatctactcggacgatcctgattccttggctgatgcgccagacccagcgctggagcatgagaagaacaagaaatcttcacgccaagcactcatttatctgttgcaggttccactagttacattcgtttctgcatacgtattggcctgggtgtcacgactccagggcggtcccatctgtgacgccggtgaggctgtgtggatttgttcccgtgctgcagaactgtggtggccaattaccactagcgtcatcgcatttggtggcatgcttggatctgcatggatcctctatgacaaataccgaaattacctacgctggcgtccttggatgggcgtgttgtggattttgattccattcagcatgctgtggggaacctcggtgctcaccttgtccatcttggggcactaaaaacttcacataaatgacaa

SEQ ID NO: 1810 - protein, 157 aa, Corynebacterium glutamicum
MNTQPEHPENDLVDEADFSNRPRIYSDDPDSLADAPDPALEHEKNKKSSRQALIYLLQVPLVTFVSAYVLAWVSRLQGGPICDAGEAVWICSRAAELWWPITTSVIAFGGMLGSAWILYDKYRNYLRWRPWMGVLWILIPFSMLWGTSVLTLSILGH

SEQ ID NO: 1811 - DNA, 2762 bp, Corynebacterium glutamicum
  CDS (1)..(2739): RXA00563
ttctacaaggatctctacgcacgttccgcacgcggcacggcagcactgtggatcgtggcggctaacttgagctcctactcagacatcgacgccatcatcaactgggtcggatccgagcagaccaccaccgtcaacggcgcatccaagctggtcaagccagctttggtccctaccttgctgttcccattcgcggcacctcgcgtgtccggatccatggcagatgcaggcccacaggcagaatcccagatgcgacttctgctctggtctgttgagcgcctcatcgcaggtcttgcgccattgggctcctccatcaacgtgggtcaccgcctgcacgtggtcatcccaggttcaccaaaccgtggacgcttcggtggcgatggtgcatacggtgaatccaaggcagctctcgacgccgtggttacccgttggaacgcagagcaagctgcatggggagcacacacctccctcgtgcacgctcacatcggttgggttcgcggcaccggcctcatgggcggcaacgatcctttggtcaaggcagctgaagaagcaggcgtggaaacctactccacccaagaaattgcagagaaactgctgtcccaggcaacttccactgttcgcgagcaggcagcatccgcgccaatcaccgtcgacttcactggcggacttggtgaatctgatctgaacctggcggaaatggcacgtgcagaagcagctaaggcagctaacgcaccagtggttgaggctccacgcacagtggcagcactgccaactccttaccgaccagtggttcaaaccacccctgatttcgcaggtcaagtcacccaaaaccttgacgagatggtcgtcatcgttggcgccggcgagctcggcccactgggttctgcacgtacgcgtttcgacgccgaactcaacggttccctctccgccgcgggtgtcatcgaacttgcatggacgatgggacttatccactgggatgaagatccaaagccaggctggtacgacgactccgacgacgcagtggccgaagaagacatcttcgaccgctaccacgacgaagtcatggcacgcgttggtgtccgcaagtacaatgacatgcctgagtacggcatgatcgacaactttgcaccagagctgaccaccgtctacctcgaccaggacctcaccttcaacgtgggatcccgcgaagaggcactgacctacgtcgactccgagccagaactcacctttgcttctttcgacgaagcagcaggggagtggaaggtcactcgcaaggcaggctccgcaatccgcgtacctcgccgcatggcgatgacccgcttcgttggtggacaggttcctaaggacttcgacccagctgtgtggggcattccagctgacatggtggacaacctggacaccgtcgcgctgtggaacattgtctgtactgtcgacgccttcctgtccgctggattcaccccagcagagctgcttgcttccgttcacccagcacgcgtgtcctctacccaaggcaccggcatgggcggcatggaatccctccgtggcatctacgtcgaccgcattctggcagagccacgcgccaacgacgttctgcaggaagcactgcccaacgttgttgcagctcacgtcatgcagtcctacgtcggtggctacggacagatgatccacccagtcgcagcttgtgcaaccgcagctgtttctgtggaagaagcactggacaagatccgcatcggcaagtccgacttcgttgtcgcaggtggcttcgatgccctgtccgttgaaggcatcaccggcttcggcgacatggcagcaaccgccgactccgcagagatggaaggcaagggaattgagcaccgcttcttctcccgcgccaacgaccggcgccgcggtggattcatcgaatccgaaggtggcggaaccgtccttctggcacgcggatcactcgcagctgacctgggccttccagtactcggtgtcatcggattcgcagagtcctttgcagatggtgcccacacctccatcccagccccaggcctcggtgcccttggtgctgctcgcgatggtgtggaatctcgccttgcagtagcactgcgttccgtcggtgtctctgctgatgagatctccattatctccaagcacgacacctccaccaacgcgaatgatccaaacgagtccgacctgcacgagcgcatcgcatccgctatcggtcgtgcagacggcaacccgatgtacgtgatttcccagaagtcactcaccggacacgccaagggtggtgcagcagcattccagatgatcggtctcacccaggtcctccgatccggactggtgccagccaaccgcgcactcgactgcgttgacccagtactgtccaagcattcccacctcgtctggctgcgcaagccactagaccttcgtgcgaaggcaccaaaggcaggtcttgttacctcccttggcttcggacacgtctccgctctggttgcgattgttcacccagacgccttctatgaggcagttcgtgtggcacgtggtgctgaggcagctgacgtatggcgcgcatccgcgatcgctcgcgaagaagcaggccttcgtaccatcgtcgccggtatgcacggtggcgtactgtacgaacgcccagtcgagcgcaacctcggtgtccacggagacgcagctaaggaagttgaagctgcagtcctcctggattcccgcgcccgcctagttgacggtgtcctccgcgccgaaggctagttggttattgcgttgagccc

SEQ ID NO: 1812 - protein, 913 aa, Corynebacterium glutamicum
FYKDLYARSARGTAALWIVAANLSSYSDIDAIINWVGSEQTTTVNGASKLVKPALVPTLLFPFAAPRVSGSMADAGPQAESQMRLLLWSVERLIAGLAPLGSSINVGHRLHVVIPGSPNRGRFGGDGAYGESKAALDAVVTRWNAEQAAWGAHTSLVHAHIGWVRGTGLMGGNDPLVKAAEEAGVETYSTQEIAEKLLSQATSTVREQAASAPITVDFTGGLGESDLNLAEMARAEAAKAANAPVVEAPRTVAALPTPYRPVVQTTPDFAGQVTQNLDEMVVIVGAGELGPLGSARTRFDAELNGSLSAAGVIELAWTMGLIHWDEDPKPGWYDDSDDAVAEEDIFDRYHDEVMARVGVRKYNDMPEYGMIDNFAPELTTVYLDQDLTFNVGSREEALTYVDSEPELTFASFDEAAGEWKVTRKAGSAIRVPRRMAMTRFVGGQVPKDFDPAVWGIPADMVDNLDTVALWNIVCTVDAFLSAGFTPAELLASVHPARVSSTQGTGMGGMESLRGIYVDRILAEPRANDVLQEALPNVVAAHVMQSYVGGYGQMIHPVAACATAAVSVEEALDKIRIGKSDFVVAGGFDALSVEGITGFGDMAATADSAEMEGKGIEHRFFSRANDRRRGGFIESEGGGTVLLARGSLAADLGLPVLGVIGFAESFADGAHTSIPAPGLGALGAARDGVESRLAVALRSVGVSADEISIISKHDTSTNANDPNESDLHERIASAIGRADGNPMYVISQKSLTGHAKGGAAAFQMIGLTQVLRSGLVPANRALDCVDPVLSKHSHLVWLRKPLDLRAKAPKAGLVTSLGFGHVSALVAIVHPDAFYEAVRVARGAEAADVWRASAIAREEAGLRTIVAGMHGGVLYERPVERNLGVHGDAAKEVEAAVLLDSRARLVDGVLRAEG

SEQ ID NO: 1813 - DNA, 528 bp, Corynebacterium glutamicum
  CDS (101)..(505): RXA00564
caacgatggagtgctattcgtaacgaggtgacattcccaccggcaccttgatccagatagaaaaacggatggaaccagtattgggaaaaggatggttgcgatgaaatacaacgtcgatgtctctcgtgaaagcgaggactggctcgccaccgtcaccaatctcgaaggcgtatccacgtgggcgacaaccttcgccaaccttgatcgcaacggccgggaagccattgctctagctgaagatctccccgaaggtgcggaaagctcactgaccatctcttggtcggttcctacagattcccaccccgaactggacactgcaattcaaattgctcaacagcgtcgctatctagtgcaagcccaacaagacttagagcccaaagttcgatccgctatttccgctctcacccaagctgcgctgctaggtatgactgcaggtcgagtatccccaactcacaacccgggtagcagagctatctcattggatcaggtgtcaggagttttaaactagcgtgcgcaattcccgtgtga

SEQ ID NO: 1814 - protein, 135 aa, Corynebacterium glutamicum
MKYNVDVSRESEDWLATVTNLEGVSTWATTFANLDRNGREAIALAEDLPEGAESSLTISWSVPTDSHPELDTAIQIAQQRRYLVQAQQDLEPKVRSAISALTQAALLGMTAGRVSPTHNPGSRAISLDQVSGVLN

SEQ ID NO: 1815 - DNA, 774 bp, Corynebacterium glutamicum
  CDS (101)..(751): RXA00573
gacgccaactccatctgtgttcatggggataatccgcaagctctcgcattggtggagaaaatcgtgaccacccttgcagctcatgaggttcaggtttcccatgctcgttaggccatgtggtgagcaagcagtcatcatcgatttgcttgctgaagatgccgaagccgtccaaggcagcatcttggatgctgttcttgcactcaaccgctctttggtgggcatgcaggtccctggaatcatcgatactattcccgctgcgcaaacactgttagtgacgtttgacaccaagcagatcaccccgaatcgtttcgcagagatcgttgattcaattgcgctgaccccagccgcaaagggcgcagcagagcttaccgacaccattgagattcccgtggtctacgacggccctgatctagaaaccgtagctcaacacacaggtctgagcgtggaggaagttatcgccacgcattctggcaccgtgtggactgctgctttcggtggatttgcaccaggtttttactatctgatcccccagactcccctgtgggatattccccgcttggaatcgccacgcaccaagattcctgcaggttctgtcgcagtggccggtgaattcagcgctgtgtacccgcagcagtcccctggtggttggcaactgctgggcactactgagattcccatgtgggatgtggaccggtggcaaccatcgcttctcaagcccggtgattcagttcgatttgtgcaggtgaagaaatgagcttcaaagtaatttccact

SEQ ID NO: 1816 - protein, 217 aa, Corynebacterium glutamicum
MLVRPCGEQAVIIDLLAEDAEAVQGSILDAVLALNRSLVGMQVPGIIDTIPAAQTLLVTFDTKQITPNRFAEIVDSIALTPAAKGAAELTDTIEIPVVYDGPDLETVAQHTGLSVEEVIATHSGTVWTAAFGGFAPGFYYLIPQTPLWDIPRLESPRTKIPAGSVAVAGEFSAVYPQQSPGGWQLLGTTEIPMWDVDRWQPSLLKPGDSVRFVQVKK

SEQ ID NO: 1817 - DNA, 795 bp, Corynebacterium glutamicum
  CDS (101)..(772): RXA00576
acagtccgagcttcttagcggcggtctgtggcttcatagccctgcccgatggctggcgtacagattcttcgttcacgcccacaacggtagcattgttttcatgctgaccttaagtttcatcactggcacggagccaggaaagtggtttacccgattccgagatcggactcatcacggtggacttgagacccttgattcggacgacgccctaggcctcatgctcgctggccaggcacaactcgccttaaccaggcttccagatgcgcgtatcgacgcctccctccacgtggtcactctttatcaggaacaacccggagtcgcttttccaaaagactttttcctcagtgccgaagaaggcgcggtggaccttgcggacttagatggggagatcatcaactggtccatgcccgatagtggggaagtcgatgccgctgctgttcgcgatgctctgcaaatcgtggcagcgaacgtcggtgtggtgatcgcccccaggccacttctcaaggtgttgagcaagaaattggtggagcaccgggacatcaagggtggaactgaaacatctatcgccctggtatggaagaaagatgaggattctgaagagattcaagacttcgtcggtattgctcgcggtcgaacgcggaattccagcaggcagcaaacggtaaagctcagtgctcgtgaaaaaacactggcaaaacaagcccgcaggcagggggagaaaccaaaaactccgaagcgtccgcaggcaagaaaacgtcccggaaaacggcgataggggtcacccgcgcatgtccg

SEQ ID NO: 1818 - protein, 224 aa, Corynebacterium glutamicum
MLTLSFITGTEPGKWFTRFRDRTHHGGLETLDSDDALGLMLAGQAQLALTRLPDARIDASLHVVTLYQEQPGVAFPKDFFLSAEEGAVDLADLDGEIINWSMPDSGEVDAAAVRDALQIVAANVGVVIAPRPLLKVLSKKLVEHRDIKGGTETSIALVWKKDEDSEEIQDFVGIARGRTRNSSRQQTVKLSAREKTLAKQARRQGEKPKTPKRPQARKRPGKRR

SEQ ID NO: 1819 - DNA, 471 bp, Corynebacterium glutamicum
  CDS (101)..(448): RXA00577
ctggctccgtgccagtgatgaaacttaaggtcagcatgaaaacaatgctaccgttgtgggcgtgaacgaagaatctgtacgccagccatcgggcagggctatgaagccacagaccgccgctaagaagctcggactgtttttgcccgccacgccagaggagttccaaacaggtgcattgactcaccaagagttcaagaacctgcaggaaaacccaccggagtggctccaaaccctacgccgcgagggcccacaccctcgtccagtggtcgcccaaaaattgggcatcaccatcgcggctctgaaaaagaacgacatggacaaaccactgaccaccgccgagatcaaggcacttctggaaaaccagccagaatggttgcgcaccgcacgcacacagcttgctgaaggtcgcgaaaccgcaaagaaagaaactgaagaaactaccgaagactaaatcttcacaaagactgcgct

SEQ ID NO: 1820 - protein, 116 aa, Corynebacterium glutamicum
MKPQTAAKKLGLFLPATPEEFQTGALTHQEFKNLQENPPEWLQTLRREGPHPRPVVAQKLGITIAALKKNDMDKPLTTAEIKALLENQPEWLRTARTQLAEGRETAKKETEETTED

SEQ ID NO: 1821 - DNA, 846 bp, Corynebacterium glutamicum
  CDS (101)..(823): RXA00578
tgggcggtgcacttcttgctctgtctgatccggaggctgagtgggaggaaatccgcgttaaatcacggcctctgctgaatttgtttggggttgaattcccatgacgtacctcgtgtgggacggtgcaacactcgtagaaggcgcgctggaatcaacacccacagttgttgattcctacctagccaaagaccaccgcgtggtgcgctgggatcttcatgaacagcgcttcgccactagcgtggacgtggacccgtgggattttctccacgcagtaagggaagcaattccacgccagggctcatggtttcccaaagttgaatggcatggcgatgatcttttcgcagtcaatattcgcccggcaccaacactgcgaaaggccacatcattgtggctttccgaagacccagatccacgcacacagccaaccattaaaggcccagacctagatgtgcttgctcaccttcgcagtcgcgccaacgataacggctgcgatgatgcgctgttgatcagcgcggatgggttcattctggaagctgccaacgccaccgtggtgttttgggcggatccacagacggtcatcgtgcccaggggagatgtgctcccatcggtgacactcgccgcaaccattccgctgtgggaaaaagccggaatcacattgcgctatcaaaacattcggcacattggttttcccgcgtggtgcggtagttcgctgcatggttggacacctgtggtcagttggggcaggggattgggcaaaattgcagcagcgaaagctccatcggtgaagccctggaatgaaaaattgcgcccaaccatttttctgtgaggaaaaggttgagcgcagtc

SEQ ID NO: 1822 - protein, 241 aa, Corynebacterium glutamicum
MTYLVWDGATLVEGALESTPTVVDSYLAKDHRVVRWDLHEQRFATSVDVDPWDFLHAVREAIPRQGSWFPKVEWHGDDLFAVNIRPAPTLRKATSLWLSEDPDPRTQPTIKGPDLDVLAHLRSRANDNGCDDALLISADGFILEAANATVVFWADPQTVIVPRGDVLPSVTLAATIPLWEKAGITLRYQNIRHIGFPAWCGSSLHGWTPVVSWGRGLGKIAAAKAPSVKPWNEKLRPTIFL

SEQ ID NO: 1823 - DNA, 642 bp, Corynebacterium glutamicum
  CDS (101)..(619): RXA00582
actggccagccttccgacgcatcgacttcctccgcgccattcgcgactactcgcagcgcagcagaagattcggtaaataacttattctccaaggagagacatgtctgactacatcgtcgcatttgaatccgcatacggctctaccaagcagtacgcagaatctctggcgcaacgcctcggcgtagatgccttaaattttgaacaagcgtgtgcggaactcgcggcgaacccgaccgcagcaatcgtggttttgagctttgttcacggcccatcccatccaggtgcgaaattcattaccgataccgatctctccggccaccgcgtcgcactgtgcaccgtcggcatgacgcttgatgatgtcgtgcaaaagaaggacggcgcagctcgatcactgggaaacaaggcagacgatgtcacccgtttctaccttccgggacgccttaattactcagagctctcgaccgcgcaccgcaccaccatgtggacgatcgtcaacatgctgaaagcgaagccgttgaagaatgacaacgacaaaatgatgatcaacacttttgataccgatgttgaccgcgtcgatgagtcccgcctggacgcagtggaggagtgggcgaggggcctctagagtgggcgttgcaaaaactc

SEQ ID NO: 1824 - protein, 173 aa, Corynebacterium glutamicum
MSDYIVAFESAYGSTKQYAESLAQRLGVDALNFEQACAELAANPTAAIVVLSFVHGPSHPGAKFITDTDLSGHRVALCTVGMTLDDVVQKKDGAARSLGNKADDVTRFYLPGRLNYSELSTAHRTTMWTIVNMLKAKPLKNDNDKMMINTFDTDVDRVDESRLDAVEEWARGL

SEQ ID NO: 1825 - DNA, 441 bp, Corynebacterium glutamicum
  CDS (101)..(418): RXA00585
tgtgaagacgtcgatcccagaagatgacctgtttgccggaatcacacccgatgcagaataatgcagttagaccacatcctttaggaaggaccttttcggcgtgattgacctcagccctgtattcaatacagctgccggcgtatacaacgacaccaacgcaatcatcttggctcagcagcagcaaggtggaccacttggacctgagtttggaaaggcctcgccggttggtttgctactgatcgtcgcgatgctcgttgccattcttgttctcggctgggcgttccaccgacgctggtcacggatgaatcgtcgtcgtattttcgcagagcgcaacggccttgatcccttcgatattgagggtgttcgcaaggcaatggctgaggccggcttgaatgaaaagtccaaaaagggcttcctttaaaaagaaagtgtgttaaggtt

SEQ ID NO: 1826 - protein, 106 aa, Corynebacterium glutamicum
VIDLSPVFNTAAGVYNDTNAIILAQQQQGGPLGPEFGKASPVGLLLIVAMLVAILVLGWAFHRRWSRMNRRRIFAERNGLDPFDIEGVRKAMAEAGLNEKSKKGFL

SEQ ID NO: 1827 - DNA, 1005 bp, Corynebacterium glutamicum
  CDS (101)..(982): RXA00586
tcatccaaggggtaaataggtatgacggcggaaacgactatcatgaatgcaatacacatcaactaaaccctgcggaagcatataaagcttcaaggaaaggatgaaacacgtgagtggtctacgcctaatggcgatccacgcccaccctgacgacgagtcaagcaagggcgcagcaaccatggcgcgctatgcagctgagggcaatcaagtaatggttgttacctgcactggtggtgagcgtggagacattctcaaccctgctatggataagccaggaatcctggacaatatttttgctgtgcgtcaggaagagatggcgaaggccatggaaattcttggcactgagcacagatggctaggttatgaggactctgggctgccccaaggtgatcctttgcctcctctgcctgagggctgttttgctttagaagactcggataaagtcacccaagatttagtgaagattctgcgcgagttccgcccacacgtcatcattacctatgatgagaacggcggttacccacacccggatcacctcaaggttcatgaggtgtcgatgcttgcatgggagaagtccggcgatgcagcgtatgcacctgagttgggcgcaccgtgggagccactgaagctttattacacccacggctttatccgtcagcgcatggaaatgttccatgatctgctcattgaacagggcaagcccagcccatacaccccgatgcttgagcgttggaaggcaaatgaggctgatgtgatggctcgagttaccactcaggttccttgtgagcgcttctttgatcagcgtgatgacgccctgcgtgcgcacgcaactcagattgatcctgcgggtgctttctttggaactcccgttgaggtgcagcgtcgcctgtggccgactgaagagttcgaattagctaaaactcgtgtgaagacgtcgatcccagaagatgacctgtttgccggaatcacacccgatgcagaataatgcagttagaccacatcctt

SEQ ID NO: 1828 - protein, 294 aa, Corynebacterium glutamicum
MKHVSGLRLMAIHAHPDDESSKGAATMARYAAEGNQVMVVTCTGGERGDILNPAMDKPGILDNIFAVRQEEMAKAMEILGTEHRWLGYEDSGLPQGDPLPPLPEGCFALEDSDKVTQDLVKILREFRPHVIITYDENGGYPHPDHLKVHEVSMLAWEKSGDAAYAPELGAPWEPLKLYYTHGFIRQRMEMFHDLLIEQGKPSPYTPMLERWKANEADVMARVTTQVPCERFFDQRDDALRAHATQIDPAGAFFGTPVEVQRRLWPTEEFELAKTRVKTSIPEDDLFAGITPDAE

SEQ ID NO: 1829 - DNA, 606 bp, Corynebacterium glutamicum
  CDS (101)..(583): RXA00587
cccttggatgacctcggttaacagtttttcctgaggtgactaagatgtataggtgaccaactcgattcggctttgaagaggatgcagacagacttccatcatgagtacaaattccaactctccatccaacgcatcaggcgcttcgaacattccaaacacccaacgtccggctagccgatacaattcgcctcgcccggaagctgctgcaggcaggaacatcagcggaaaaatcatcgcagtcattggcgtgctgctggtgatcgccattgtgattgttggcgcaaacttcctcaaaaaccgcgatgcacaaacagtgtccggccaaatgggttcatttgaacgcatcgacgacgacaccttccgctttgaagttgacgtcacccgcgatgacccaagccaagtcgcctactgcatcgtgaccgcaaaggactactcgcacgcagaagtcgggcgtcgagaagtgcttgtggagcccagcgaccactcaacggtgcgtatctccacgctgatccccacccgcgaaccagcagtttccggtggtgtttacggttgttcaaccgtgatcccatcacatatgaacctgtaaaactagaaaattttgctgtg

SEQ ID NO: 1830 - protein, 161 aa, Corynebacterium glutamicum
MSTNSNSPSNASGASNIPNTQRPASRYNSPRPEAAAGRNISGKIIAVIGVLLVIAIVIVGANFLKNRDAQTVSGQMGSFERIDDDTFRFEVDVTRDDPSQVAYCIVTAKDYSHAEVGRREVLVEPSDHSTVRISTLIPTREPAVSGGVYGCSTVIPSHMNL

SEQ ID NO: 1831 - DNA, 353 bp, Corynebacterium glutamicum
  CDS (1)..(330): RXA00595
cgcaatattgcagcatggatcgcaatcgccgccatcatcatcgccagcctgggcgcactgctctcgatgatccgcgtgtggcgtgaagtcttctggggtggcgcaatgcaccagcgcggcgtctcgccgcagctgcgcatcagcccagcaaaaatcgccccagcgctcagcctgatcattttatcggtaggcatgttcatcttcgcgggcccgcttatcgacgcgaccctcaccgccaccgacggcctcttgaacaccgatgcataccaacaggctgtgctcggtgaaaatgccatcggagtgccaagccctagctaccagggaggaaactaatgcttaacgccctgaaattc

SEQ ID NO: 1832 - protein, 110 aa, Corynebacterium glutamicum
RNIAAWIAIAAIIIASLGALLSMIRVWREVFWGGAMHQRGVSPQLRISPAKIAPALSLIILSVGMFIFAGPLIDATLTATDGLLNTDAYQQAVLGENAIGVPSPSYQGGN

SEQ ID NO: 1833 - DNA, 393 bp, Corynebacterium glutamicum
  CDS (101)..(370): RXA00597
caaggagatccgccccagcgatgctgagtggccaagtcgcgagatcgctgacaccgcccaaaacaccgtcagccaagacaagagggagttttaaaacaacatgactgcttttggaattgtcaccacagttggcatctgcatgtttgcgttctccctcttatctgccctggtccttattctgcgcaccaaagatttcctcacccgcgtggtgctttccgacatggttttctactctatgatcgcgatctacctcatctgggtgctcaacaacccaacctcaatcgcctttgagattgctcttctcgcagcagtcctcggcggcgtacttccaaccctgtccatggctcgcatcatttcgaagggacgcaggtaaatgaccattccagagatcat

SEQ ID NO: 1834 - protein, 90 aa, Corynebacterium glutamicum
MTAFGIVTTVGICMFAFSLLSALVLILRTKDFLTRVVLSDMVFYSMIAIYLIWVLNNPTSIAFEIALLAAVLGGVLPTLSMARIISKGRR

SEQ ID NO: 1835 - DNA, 441 bp, Corynebacterium glutamicum
  CDS (101)..(418): RXA00598
aacctcaatcgcctttgagattgctcttctcgcagcagtcctcggcggcgtacttccaaccctgtccatggctcgcatcatttcgaagggacgcaggtaaatgaccattccagagatcatcgtctccatcctcgtgatcctcgcaggcctgttttctctaggtactgcaatcgctttgtggcgcgcaccggatccgctcacccgagccaacctgcttggcaccaccgtgggtgtctccataccgctgctcatcattgcgctgctgattcacacctggtccgtcgacggatttaaccccaacaatttcatccgagcgatcatcgccatcatcggcgtctgggtcatcggttccgttggttcctactacatgggacgcgccatctatggtgtgaccgtagtggataacagacgatccaaataaactgcttttagaaaaaaagg

SEQ ID NO: 1836 - protein, 106 aa, Corynebacterium glutamicum
MTIPEIIVSILVILAGLFSLGTAIALWRAPDPLTRANLLGTTVGVSIPLLIIALLIHTWSVDGFNPNNFIRAIIAIIGVWVIGSVGSYYMGRAIYGVTVVDNRRSK

SEQ ID NO: 1837 - DNA, 414 bp, Corynebacterium glutamicum
  CDS (101)..(391): RXA00601
tagatatagaacacattctattgcagggaattatcaagtttcatacattgtcctcgtaggggcaagtatatttcccatgcaatattttttaggagtcccaatgcgtttcaagtcagttgcagctatcgcactttccaccgcaatgatcaggggtggaaccgcaagcgttgctaatgctcagcaggttagccctagttccacgattgagatccctcaagaattcgtccacaccgtgcagaacttcgtgccaggtatgacttacggcgatgcagggtccgctatccagagcaccgctggttctgtggcactgaacagtaccgctggaatcatccttccaatcgttcttccattccttggtctgggagctgttggttctgcagcgctgtctgcttaagccttttctaggttccttaa

SEQ ID NO: 1838 - protein, 97 aa, Corynebacterium glutamicum
MRFKSVAAIALSTAMIRGGTASVANAQQVSPSSTIEIPQEFVHTVQNFVPGMTYGDAGSAIQSTAGSVALNSTAGIILPIVLPFLGLGAVGSAALSA

SEQ ID NO: 1839 - DNA, 876 bp, Corynebacterium glutamicum
  CDS (101)..(853): RXA00602
gcgcgatcaatggaatctagcttcatatattgcacaatagcctagttgaggtgcgcaaactggcaacaaaactacccggcaattgtgtgatgattgtagtgtgcaaaaaacgcaagagattcattcaagcctggaggtgtcgccatccaaggcagccctggaaccagatgataaaggttatcggcgctacgaaatcgcgcaaggtctaaaaacctcccttgctgcaggtttgggcatgtacccgattggtattgcgtttggtctcttggttattcaatacggctacgaatggtgggcagccccactgttttccggcctgattttcgcgggctccaccgaaatgctggtcatcgccctcgttgtgggcgcagcgcccctgggcgccatcgcgctcaccacattgctggtgaacttccgccacgtattctatgcgttttcattcccgctgcatgtggtcaaaaaccccattgcccgtttctattcggttttcgcgcttatcgacgaagcctacgcagtcactgcggccaggcccgcaggctggtcggcgtggcgacttatctcaatgcaaatagcgtttcactcctactgggtattcggcggtctcaccggagtggcgatcgcagagttgattccttttgaaattaagggcctcgagttcgccctttgctctctctttgtcacgctgactttggattcctgccgaacgaaaaagcagatcccttctctgctgctcgcaggtttgagcttcaccattgctcttgtggtaattccaggtcaggccctatttgcggcgctgctgatcttcttgggtctgttgaccatccggtacttcttcttgggaaaggctgctaaatgacaactgatttctcctgtatt

SEQ ID NO: 1840 - protein, 251 aa, Corynebacterium glutamicum
VQKTQEIHSSLEVSPSKAALEPDDKGYRRYEIAQGLKTSLAAGLGMYPIGIAFGLLVIQYGYEWWAAPLFSGLIFAGSTEMLVIALVVGAAPLGAIALTTLLVNFRHVFYAFSFPLHVVKNPIARFYSVFALIDEAYAVTAARPAGWSAWRLISMQIAFHSYWVFGGLTGVAIAELIPFEIKGLEFALCSLFVTLTLDSCRTKKQIPSLLLAGLSFTIALVVIPGQALFAALLIFLGLLTIRYFFLGKAAK

SEQ ID NO: 1841 - DNA, 414 bp, Corynebacterium glutamicum
  CDS (101)..(391): RXA00604
atcacgttttgctatgaaagtggtgaaaccagctcgcccccaggtgtgaagcatgcattttgaagcatgaatctttttcatctagtgaaggactgatcccatgcgtatgaaatcaatcgcagcaattgcaatcgctaccgccgccctggctggtggcactggagtcgctagcgcacaggaagctggctcgactgctggttcctccaacctcagctctgggatccagcttccacaagaagccaccgatctgttgagcttcctgcctgctgctcaggctgcgcaggttgaaggagcaattcagagcaccgctggtttctttgccgttggactcggctcgaccgccattggttccactgcagtgaccttgggaattgcggatctgctgtctagctaatttcctctcaatagcttcaa

SEQ ID NO: 1842 - protein, 97 aa, Corynebacterium glutamicum
MRMKSIAAIAIATAALAGGTGVASAQEAGSTAGSSNLSSGIQLPQEATDLLSFLPAAQAAQVEGAIQSTAGFFAVGLGSTAIGSTAVTLGIADLLSS

SEQ ID NO: 1843 - DNA, 987 bp, Corynebacterium glutamicum
  CDS (101)..(964): RXA00610
caagcactcccaggggaacgttcattcgaaaaactcgacgccttatacgagcttctagagcctcggaaccaattgctcgagatcgcagtctaactagagtatggaaccgaaaaaacctgtcacatataaagaacttgcccacgaatattcaagaagaacgtttaacaaactcttcaccaaaattactggcttcgtctatctaaaaaacgatctaatcaacgatcccaacttagtgacccaagcactgctcaaaagatgcccagaaggagtacttcgcggatatgcagcattaaagcaacgtggctatcagcttttagacgatcagtggatgccaatcatcagtgtttccggagatctaaacaggagggactgctcacgaggtgaaattctcaggcggattgaaccagaaaacaccctgctcagtggcaacattaggttcgttaatgatgttcaagcgatccaagacgtcttcgacctgcattctctcaacgactttgaagaccaagtagctctcatcgatcatctcatcaggcagcgccccgaattattccaagaactcatacaagagccaaaacttaagaaacacactcaatacgccaatccttttgctgaatctccgcaagaatcacgacttcgggtcagacttcattcactgggttaccacggcttcatcccacagattcatgttgaatacgacggtcaatcctattttctagatctcgcagatccgctgtggcaggttgccctcgaatacaacggcggatggcactacacctctgagcagcgagagaaagattctcatcggaagaatgctctgaaaagtgcgggatgggatgtcctagaagtgacatcaaaaactctgcagaatccgaattcctggaacaacctgatacaacagatcaatagctctctccgccgaaagcaggctcagcgacgccgaaggttacccatgcaaacggtgggctaacggcatcactgaaaaagacc

SEQ ID NO: 1844 - protein, 288 aa, Corynebacterium glutamicum
MEPKKPVTYKELAHEYSRRTFNKLFTKITGFVYLKNDLINDPNLVTQALLKRCPEGVLRGYAALKQRGYQLLDDQWMPIISVSGDLNRRDCSRGEILRRIEPENTLLSGNIRFVNDVQAIQDVFDLHSLNDFEDQVALIDHLIRQRPELFQELIQEPKLKKHTQYANPFAESPQESRLRVRLHSLGYHGFIPQIHVEYDGQSYFLDLADPLWQVALEYNGGWHYTSEQREKDSHRKNALKSAGWDVLEVTSKTLQNPNSWNNLIQQINSSLRRKQAQRRRRLPMQTVG

SEQ ID NO: 1845 - DNA, 1599 bp, Corynebacterium glutamicum
  CDS (101)..(1576): RXA00611
ctttaaattgactatttacaaaactacttgatgagttagcaagagcacatttcggtgcgcctccctgctaaacctcgaaacaataactagattgcacactatgtctgccgctgcttctcgatcaagaaacatcttgactgccctcctgctattggtcccgctcatcgcaggtaccatctacgcctccgccatgggcttggacgtctcccgcgcatggtcctcagcagatgaagtaacgggggcacctgcagcctccgtagccaccaacaaccaggagcttatcgaagcccgtcgcgccgccggagaagccggcgcccaagcggggttcctcacctcaggaactgaagagctaaccagcggaacacaagagcttatcgacggcgcagccccactcgaagaaggcgtctcagccgcggctgacggtgcagcgcaactccacgatggcctcatccaactccaggccggcactggacaaatgggaaccggcgccaccgaaattgccgacggcgtccaaaacgcagtcgaacaacttggcggtcttgtcgttgtacagcagcaactcttaggcgccctcaacgaagcagacaaacaactcgcctcgagcaaaatccccgaagccgaagacctgcgcaaacaaatcaccgaagtccgaggacacctcgaaaacttcggcatctccgtagaaatgaccgaccaactcgatcaactacgttccggcacccgcgacctggctaaccaactcgcagtccccggctacggattccacgatggtatttacagcgccaccaatggagcagccgaattatctgcaggtttgcaagagctagaagcaggcgttgggactgccgtcgaaggcttcaccgcactcgatgaaggtgcaaaccgattagactccatggccaccctcaacgaagaaaaaacctccgcagtccaacgagccctcccggtaccccaagtacccgccggcacaatcgaaggcaccgcagacgaagaacgcaccagcgcactagcgcccatgtacgccttcttaatttcagcattggtcatgctggccggtgcagcacttggatgggcaacactaaaaaacaagtggctgatggcctttgctgtcattggtgtcactgcaatcggtggcattatcttgttcaccgtagctttgggcatatccattggagctttgtttggagccttaggaattttgcttcttgccactgttgttgccggtattctctcccggattttgcttgacgtgttgggaactaccggggctattgtggtttctgttctgggatgggtagcccaagctgcagtaattggccatgtatggagtgttaccgctgtatccgatatcgcacttgtttggcgagtcgtcgcaggcatgatgccactgcattatccaacctttgcagtgacctccattggtaatggcggatcagctgcagctatctggatgtctgttgctgtcttgttggcaatgggagcgatcggagctgttgcgcttcggaagccaaaggcggttgcggttgaggttgaagaagctgttgatgctgatgcagaccaagcagcctcggaatcctgatggttttggtctgattcgac

SEQ ID NO: 1846 - protein, 492 aa, Corynebacterium glutamicum
MSAAASRSRNILTALLLLVPLIAGTIYASAMGLDVSRAWSSADEVTGAPAASVATNNQELIEARRAAGEAGAQAGFLTSGTEELTSGTQELIDGAAPLEEGVSAAADGAAQLHDGLIQLQAGTGQMGTGATEIADGVQNAVEQLGGLVVVQQQLLGALNEADKQLASSKIPEAEDLRKQITEVRGHLENFGISVEMTDQLDQLRSGTRDLANQLAVPGYGFHDGIYSATNGAAELSAGLQELEAGVGTAVEGFTALDEGANRLDSMATLNEEKTSAVQRALPVPQVPAGTIEGTADEERTSALAPMYAFLISALVMLAGAALGWATLKNKWLMAFAVIGVTAIGGIILFTVALGISIGALFGALGILLLATVVAGILSRILLDVLGTTGAIVVSVLGWVAQAAVIGHVWSVTAVSDIALVWRVVAGMMPLHYPTFAVTSIGNGGSAAAIWMSVAVLLAMGAIGAVALRKPKAVAVEVEEAVDADADQAASES

SEQ ID NO: 1847 - DNA, 576 bp, Corynebacterium glutamicum
  CDS (101)..(553): RXA00613
tggcgataccagctccgagtagggctgcacttgaaaaagtgagtgttttagcgatagttgacaccttattcaccctacctggggagtactctgggcaaacatgagtgaactaaaagacaaaatccgcgcagatctgaccaccgctatgaaggcccgcgacaaggacaccactggtaccttgcgcatgctgctttccgcattgacccaggaagaaacatcgggaaccaagcacgaactcaatgatgaagaagtgttgaaggtgattgctcgtgagattaagaagcgtcgcgagtccgctgaggtgtacaccgaaaatggtcgtcaggaattggctgacgttgagcttaaagaggctgccattttggagggctaccagcctgagcagcttgatgatgatcagctgaacgcgctgatcgatgaggctatcgctgaagtcggcggcgaggccgatatgaagaagatgggccagatcatgaaggctgctaccgctaaggctgctggccgtgcagatggaaaacgactctccaccgcagtgaagagccgtttgagcaactaggtatttctagcggaagaact

SEQ ID NO: 1848 - protein, 151 aa, Corynebacterium glutamicum
MSELKDKIRADLTTAMKARDKDTTGTLRMLLSALTQEETSGTKHELNDEEVLKVIAREIKKRRESAEVYTENGRQELADVELKEAAILEGYQPEQLDDDQLNALIDEAIAEVGGEADMKKMGQIMKAATAKAAGRADGKRLSTAVKSRLSN

SEQ ID NO: 1849 - DNA, 1038 bp, Corynebacterium glutamicum
  CDS (101)..(1015): RXA00614
cagtggtgtccttgtcgcgggccttcatagcggtggtcagatctgcgcggattttgtcttttagttcactcatgtttgcccagagtactccccaggtagggtgaataaggtgtcaactatcgctaaaacactcactttttcaagtgcagccctactcggagctggtatcgccaccgctgcatggggatactcagagctcaaaaaattcgagctcaaaacagtagaactgccaattttgaagcctggaacgctccgtggaaagaaggaattccgccttctccacatctctgatctccacatgatcccaggccaagaaaccaaaaaagcatgggtctccgcactcgattcactaagccccgatttggtgatcaacaccggtgacaaccttagcgatgaaaaagcagtccccgacgtcctccgcgcactcggcccactgatgaaccgccccggcgcgttcgtcttcggaaccaacgattactgggcaccccgccccgtcaatcctttcggctacctcttcggtaaaaaacgcgaagtgagccacatcgacctcccctggcgagccatgcgagctgctttcatcgaacacggatggcaagacgccaaccaaaagcgactcgaattccaagtaggttccgtccgcctcgccatctcaggtgttgatgacccccaccatgacctcgacgactacacagagatcgcaggggcaccaaacgtggacgctgatctgtccatagcgttgcttcacgcaccagaacctcgagtcctcgctcagttcgaagccgacggctaccagctttccctctccggccacacccacggcggtcagctttgtcttccgggcagcaagccaattgtcaccaactgtggaatcgaccgcaaacgcgccaccggcctcaacaaatttggcgacatgtggatgcacgtttccaacggcctcggcacctcaaaattcgtcccattccgcatcttctgccgacccagcgccaccctaataaagatcactgaacaggcactttgacctgaaaaacccacaggact

SEQ ID NO: 1850 - protein, 305 aa, Corynebacterium glutamicum
VNKVSTIAKTLTFSSAALLGAGIATAAWGYSELKKFELKTVELPILKPGTLRGKKEFRLLHISDLHMIPGQETKKAWVSALDSLSPDLVINTGDNLSDEKAVPDVLRALGPLMNRPGAFVFGTNDYWAPRPVNPFGYLFGKKREVSHIDLPWRAMRAAFIEHGWQDANQKRLEFQVGSVRLAISGVDDPHHDLDDYTEIAGAPNVDADLSIALLHAPEPRVLAQFEADGYQLSLSGHTHGGQLCLPGSKPIVTNCGIDRKRATGLNKFGDMWMHVSNGLGTSKFVPFRIFCRPSATLIKITEQAL

SEQ ID NO: 1851 - DNA, 1183 bp, Corynebacterium glutamicum
  CDS (101)..(1183): RXA00617
acgactgggacgacgactaactaacccctgaggcactttctatttcatggctaaatcaactcctttgattgcatcgctacgctggcgaattgtcctgtggatgacagcggttgttttcttgaccctagccagcgttgtgatcattacccgttcggtgctgctttcagaggtaaccaacaccgcgaactcggcagttgagcaggaaattgaggagtttcgtcgctttgcagccgaaggaattgatccaacaactgcgcagccttttgagtcaggtcatcgcctgatggaggtttacctgtcgaggcagattccggatgaaaatgaagccattgtcggcattttccccggagagctcattcaggttgattactcccagctcagtggcgcccatccgcttcctttggaacactccgatccgttgatttcggaaatccgacagaccacgctgaattctggagttttcagcgatcttgaacgcggaaccactcactggggaaaggtgaatttccaaactgcttccggtgaggccgatggtgagttcgttgtcgcattcttcgctgataatcttaaagaccaggtcaacggccagatccagattcttattttgatcggcacagggggtttgattgcctcaattctgattgcttggttgattgcgggccagatcattgccccgatccgcaaattgagttccgtgtccgcaaagatcagtaattcggatctcacctggcgcgtccctgtggagggtcgtgatgagattgcgcagctggccaggacttttaatgccatgttggatcgcatcgaaatcgcgtataacgatcagcgccagttcgttgatgatgccggccacgagctgcgcaccccgatcacagtggtgcgtggccagttagagcttctcgccaccaccccgccggaggaacaagcgcggtcgattgagctggccaccactgagttggatcgaatgtcgcgaatggtcaatgatctgctcaccctcgcagtcgccgattctggcaccttcatccacgcccaccccacggatgtcacggatttaacaatcgatatcgaagacaaagcccgcaccatcagcgaccgaattttgcttgtcgacgccgccgagggcctcgtcagcctcgacgagcagcgggtcaccgaggcagtgctggagttgttcggcaatgcgttg

SEQ ID NO: 1852 - protein, 361 aa, Corynebacterium glutamicum
MTAVVFLTLASVVIITRSVLLSEVTNTANSAVEQEIEEFRRFAAEGIDPTTAQPFESGHRLMEVYLSRQIPDENEAIVGIFPGELIQVDYSQLSGAHPLPLEHSDPLISEIRQTTLNSGVFSDLERGTTHWGKVNFQTASGEADGEFVVAFFADNLKDQVNGQIQILILIGTGGLIASILIAWLIAGQIIAPIRKLSSVSAKISNSDLTWRVPVEGRDEIAQLARTFNAMLDRIEIAYNDQRQFVDDAGHELRTPITVVRGQLELLATTPPEEQARSIELATTELDRMSRMVNDLLTLAVADSGTFIHAHPTDVTDLTIDIEDKARTISDRILLVDAAEGLVSLDEQRVTEAVLELFGNAL

SEQ ID NO: 1853 - DNA, 531 bp, Corynebacterium glutamicum
  CDS (101)..(508): RXA00628
ggttgaaagtggcgtcgaaaagcgccttaaaatgaccggctcacctgcattattttatgcaacctcaatttggttgcacgccaagtagtagtctgtgcatatggcttctgtattcacgaaaattattaatggcgagctccccggccgatttgtgtatcgttccgagaatgtcgtggcttttctatccatcgaacccctcacctacggccacaccctagtcgtacccgttgcagaagttgaccgctggaccgaccttcctcagaacatctggagcgaagtaaacgaggcctcccagctcatcggaaatgcaatccgcacagcattcgacgcccctcgatgtggttacatcatcgcaggattcgatgttccccacactcacatccacctcttccccaccgacaaaatggccgattacgatttccgcaacgccatggccgcagacgccaccgaccctgcaaaaatggatgaagctgcagagaagatccgcgaagcgctggacggtctggtctagttcttgtagttctaattgct

SEQ ID NO: 1854 - protein, 136 aa, Corynebacterium glutamicum
MASVFTKIINGELPGRFVYRSENVVAFLSIEPLTYGHTLVVPVAEVDRWTDLPQNIWSEVNEASQLIGNAIRTAFDAPRCGYIIAGFDVPHTHIHLFPTDKMADYDFRNAMAADATDPAKMDEAAEKIREALDGLV

SEQ ID NO: 1855 - DNA, 1578 bp, Corynebacterium glutamicum
  CDS (101)..(1555): RXA00631
cctacctgcgccgcaaggtggacacccaggatccgcagctaattcagactgttcgtggcgttggatatgttctgcgcaccccacgtagctaaattctcctatggaaaatccttatgttgctgcgctcgatgacgaaaaccaagaagtcggcgtaaaaaaagaagcagaaaaagaacctgaaataggtcccatcagagctgccggacgagccataccgctgcgcacccgcatcattttgatcgtggtgggtatcgccgggcttggtttgctggtcaacgcgattgctgtctccagcctcatgcgtgaagtttcctatacccgcatggatcaagagctagagacctcgatggggacgtgggcgcataacgttgagctgtttaatttcgatggcgtccgccaagggccacccagcgattattatgtggccaaggtttttcctgatggatccagcatcatcttcaacgatgcacaatcggcacccgatctagctgaaaccaccatcggtactggtccacacactgtggatgctgctagcggttctgcctccaacactccgtggcgtgtgatggcggaaaagaacggtgacattatcaccgtggtgggtaaaagcatggggcgtgaaacaaacctgctgtaccgattggtgatggtgcagatgatcatcggcgcgctgattctggttgctattttgattacttcactcttcctagtcagacgctcgttgcggccgttgagagaagttgaagagaccgccaccaggattgcgggcggtgatttggatcgacgtgtcccgcagtggccaatgaccacagaagtcggacagctgtcgaatgccctcaatatcatgttggagcagctccaagcctcaattctgaccgcccagcaaaaagaagctcagatgcgccgattcgttggcgatgcctcccacgagctccgcacaccactgacctctgtgaagggcttcaccgagctgtattcatcaggtgcaacagatgatgccaactgggtcatgtccaagatcggtggcgaagcccaacgcatgagtgtgcttgtggaagacctcctgtcactgacgcgtgccgaaggccagcaaatggagaagcaccgcgttgacgtgctggaactcgccttggcagtacgcggatccatgcgagcagcctggccagatcgcacagtcaatgtatccaacaaagctgagtccattccggttgtcaaaggcgacccaactcgcctccaccaagtgcttaccaacctggttgccaacggactaaaccacggcggaccggacgcggaagtcagcattgagatcaacaccgatggacaaaacgtgaggattctcgtggcagacaacggtgtcggaatgtctgaagaagatgctcagcatatcttcgagcgtttctaccgcgccgattcctcccgctcacgcgcatccggcggatcgggcctcggccttgcgatcacgaaatccctggtcgaaggccacggcggcacagtcaccgtcgacagcgtgcaaggcgaaggcacggtgttcacgatcaccttgccggcggtttcttaaaggcatcaagggccggaaaa

SEQ ID NO: 1856 - protein, 485 aa, Corynebacterium glutamicum
MENPYVAALDDENQEVGVKKEAEKEPEIGPIRAAGRAIPLRTRIILIVVGIAGLGLLVNAIAVSSLMREVSYTRMDQELETSMGTWAHNVELFNFDGVRQGPPSDYYVAKVFPDGSSIIFNDAQSAPDLAETTIGTGPHTVDAASGSASNTPWRVMAEKNGDIITVVGKSMGRETNLLYRLVMVQMIIGALILVAILITSLFLVRRSLRPLREVEETATRIAGGDLDRRVPQWPMTTEVGQLSNALNIMLEQLQASILTAQQKEAQMRRFVGDASHELRTPLTSVKGFTELYSSGATDDANWVMSKIGGEAQRMSVLVEDLLSLTRAEGQQMEKHRVDVLELALAVRGSMRAAWPDRTVNVSNKAESIPVVKGDPTRLHQVLTNLVANGLNHGGPDAEVSIEINTDGQNVRILVADNGVGMSEEDAQHIFERFYRADSSRSRASGGSGLGLAITKSLVEGHGGTVTVDSVQGEGTVFTITLPAVS

SEQ ID NO: 1857 - DNA, 876 bp, Corynebacterium glutamicum
  CDS (101)..(853): RXA00637
ccgatggcactttccgtacctggaaggtagttgcccgcggcagaaacaattagggaaacctcttgaccttcacgcgacgtcaaggatttaactaacagtcatgacagatcgaaccattggcgaggctgctgaactactcggtgtcaccacccgcacactgcggcattgggacagcatcgggttgcttcaaccgagctggcgaaccacaacggattatcgcctttacacagaagacgatgtcgagcgcgccctgcagattcttatttacagggccgccggaatcgggttgaaggatattgcggaggtgcttgatcagccggattcggccaatcagcacctgcgccgccagcgggaactcctagtggaacagatcggtcagctgcatcggatggtccgggcagtagatgaaatccttggaaaggatgcgattagcgtgaaggaaaagattgagatcttcggcgaggatctgcccaagtaccaagaggaggctttccagcgctggggcgacaccccggagtggaaagaatcccaaaagatccaggagaagatgaccaaggaggattttcagagggcgaaagatgaacatgaggggttcgtcgaaaagcttatcgacgcctccctgcgcggcatcgcgcccggctctgcagagggcaatgagctagcgcttgcgcaccgcgcaagcatcggtcagtggtacaccgtgagtgcaaacaagcaagtaattttggctcggatgtacgtggaagacgagcgttttaacgaaacttacaaaggacacgcctcatatcttttaacacttattgaagcattggcgcaggtagaaggcgtggacttggagaatgtggagtgggaataatcccaatttcaactctttca

SEQ ID NO: 1858 - protein, 251 aa, Corynebacterium glutamicum
MTDRTIGEAAELLGVTTRTLRHWDSIGLLQPSWRTTTDYRLYTEDDVERALQILIYRAAGIGLKDIAEVLDQPDSANQHLRRQRELLVEQIGQLHRMVRAVDEILGKDAISVKEKIEIFGEDLPKYQEEAFQRWGDTPEWKESQKIQEKMTKEDFQRAKDEHEGFVEKLIDASLRGIAPGSAEGNELALAHRASIGQWYTVSANKQVILARMYVEDERFNETYKGHASYLLTLIEALAQVEGVDLENVEWE

SEQ ID NO: 1859 - DNA, 541 bp, Corynebacterium glutamicum
  CDS (101)..(541): RXA00646
aatgcaatcggaacggttaacgccaagtgatctggtgggatgtaggtaccgtcaggtccagcgcataaatttcccagaaatctctcctttacctgcaacaatgcagcgcagggcccgccgtgaggttgggttgacggaagttttggatcgtctcccagagcagcccaaaaagcggggccgaattcctttcaccagggcagatctagacaatgacgctgaattggcggagtttgaaaccctcgaagcaattgcagccggcgacaccttgattaccggcgcagtgttcacgggcaccctcgaaggggtggcatgggaagtgcaagtggatgtcttggtgcgcaaccctgatggaagctacatgcccgtgatggtgagcaatcaccgtgtcgcccgtccggatccgcacaaaactatgcagggcattgccgtcacccgcctcggtttgggtcagccgctagagctcaaggcaacgctgcgccaccacacgatcgatggctatcgcctcaccctcgcgttgatgggtttggaggaagctggagca

SEQ ID NO: 1860 - protein, 147 aa, Corynebacterium glutamicum
MQRRARREVGLTEVLDRLPEQPKKRGRIPFTRADLDNDAELAEFETLEAIAAGDTLITGAVFTGTLEGVAWEVQVDVLVRNPDGSYMPVMVSNHRVARPDPHKTMQGIAVTRLGLGQPLELKATLRHHTIDGYRLTLALMGLEEAGA

SEQ ID NO: 1861 - DNA, 579 bp, Corynebacterium glutamicum
  CDS (101)..(556): RXA00649
gtatttgatctgtggtgtggctgattcgggaggactcgatgacattatgtgtatggtacacattttgtgcaagatgcaatagctggcaaactggagagccatgagcaccgaccccatcgcggccttggaatacgaatccaccatcttcgcccgtcaccggaatcaatacaccggccaagcaggtacgaatgctggcgtcctcgattccagcggctacaacctactcacgctgctccagttacgtggcccctccaccatcggcgaactcagcgccatcaccggcctagacgcatctacccttaaccgtcagacaaaagccctactaaccaaaggatttgtcgaacgcatcccagatcccgacggtggaatcgctcggaaattccaccccaccgacctcggcaatgaactgctcaacgaggaacgcacatccagccaagaaaaatatgccgagttactttcagactggcccgaagaggatctacgcaccttcgtcaaacttcttgaaaaactaaataaagccgtggagacacgcgtcggaaagcattggccgcgcccctgactcagcccaagccagagccc

SEQ ID NO: 1862 - protein, 152 aa, Corynebacterium glutamicum
MSTDPIAALEYESTIFARHRNQYTGQAGTNAGVLDSSGYNLLTLLQLRGPSTIGELSAITGLDASTLNRQTKALLTKGFVERIPDPDGGIARKFHPTDLGNELLNEERTSSQEKYAELLSDWPEEDLRTFVKLLEKLNKAVETRVGKHWPRP

SEQ ID NO: 1863 - DNA, 672 bp, Corynebacterium glutamicum
  CDS (101)..(649): RXA00652
gcgatagctcatcgcgcccggttgattccccttcttcacaagggtttcaacatcgagctcattgcgtccggtttccgacacacgatctaggcttgactgcatgcgtcgtacattacctactatcctcgctgcttccatcatgctcaccgcttgtaccccggcggaacctgaagcaaccccagagaccaccaccgaggcagccccggaagtaattactgacggccttcccatcgacgcgatgcccgcggtcgaacgcaccgcacaaaccgcatgcccctacctgggcaccgactgggtcgccgataccaacggccagcgcgtcacgggttacggcacagacgaacgcttttcgacgccctcctgcgttttttactcctaccccgaagaaccacaactcacggtgattgtccgcgatatggccaccacggatgacgctatcgcggtagtggattgggcagcccccatcgattccactgagcccgctgaggaacccgcagggtggtccggtggccgccgaggtggaaacgatacttcaggcgcactctacgcggttcaaaacggccccaccgcggtcatcgtgttcaccaatcaggatcaatccctcaaagcgcagttaatcgctgaggaagtaatccagaatcttggtctctaactattagaaggccacatcgt

SEQ ID NO: 1864 - protein, 183 aa, Corynebacterium glutamicum
MRRTLPTILAASIMLTACTPAEPEATPETTTEAAPEVITDGLPIDAMPAVERTAQTACPYLGTDWVADTNGQRVTGYGTDERFSTPSCVFYSYPEEPQLTVIVRDMATTDDAIAVVDWAAPIDSTEPAEEPAGWSGGRRGGNDTSGALYAVQNGPTAVIVFTNQDQSLKAQLIAEEVIQNLGL

SEQ ID NO: 1865 - DNA, 1389 bp, Corynebacterium glutamicum
  CDS (101)..(1366): RXA00654
cagcaatagcgattattgcttgattgtgtgtttttagatcttcggttctcttcactcaactgctgtgaagtgccacctgtttggaaaggcgaacacgatagtgctcgatattttgatttacccggtgtctggagtgatgaagctgtggcacctgcttcttcacaacgttgcgggtttggacgattcactggcgtggttcttttcccttttcggccttgtcatcacgatccgtgcaattatcgcgcctttcacctggcagatgtataagtcgggccgcactgccgcacatattcgtcctcaccgcgctgcgctccgggaagaatacaagggaaagtacgatgaagcgtccattcgggagttgcagaagcgccagaatgatttgaataaggaatacggcattaacccgctggcaggttgtgtgcctgggctgatccagataccgattgtccttggtctttactgggcacttctccgcatggctcgccctgaaggtggtttggaaaatcccgtcttccagtcgatcggcttcctaactcctgaggaagtggaatctttcctcgctggtcgcgtgagcaatgtgcctctgcccgcttatgtttcgatgcccactgagcagctaaaatatttgagcaccacgcaggcggaagttcttagtttcgttttgccactgttcatcacagccgcaatcctcaccgcaatcaacatggcgatgtccatgtaccgcagcttccaaaccaacgattacgcatccggattctctaacggcatgctgaagttcatgatcgtgatgtcgatcctcgcgccgatcttcccactgtcccttggcctcacaggaccattccccacagcaatcgcactctattgggtcagcaacaacctgtggacgctcctccaaacaatcatcatgatggtcattttggaacgcaaatacccacttaccgacgatttcaaagtgcaccacctagagcagcgcgacatctaccgcgcaaaacaaaaagaaaagcgcatcttcctgtggacacgacgcaaaaaccgcgccctgatgattctcaccccatggaacgcctcaacgcttcacgcaacaaacgtggaactcaccaaaacccgtactgccgaaatcaacgaagcaaaacaggcccgcaaagaaatcgcgaacaagaggcgcgaaacgcaacgtgaaatgaaccgcgccgccatgcagcgcttaaagcagcgtcgcgctgaggttaaagctaaaaagaaggggcttatcgacgcctcccccaacgaagataccccttcggaaaatgaagaaactaaattgagtagtccgcaggtggagccgacaacaactgccgagccaaatcgcgagccgtctcaagaggactgatgttgtggaccaatcgagat

SEQ ID NO: 1866 - protein, 422 aa, Corynebacterium glutamicum
VLDILIYPVSGVMKLWHLLLHNVAGLDDSLAWFFSLFGLVITIRAIIAPFTWQMYKSGRTAAHIRPHRAALREEYKGKYDEASIRELQKRQNDLNKEYGINPLAGCVPGLIQIPIVLGLYWALLRMARPEGGLENPVFQSIGFLTPEEVESFLAGRVSNVPLPAYVSMPTEQLKYLSTTQAEVLSFVLPLFITAAILTAINMAMSMYRSFQTNDYASGFSNGMLKFMIVMSILAPIFPLSLGLTGPFPTAIALYWVSNNLWTLLQTIIMMVILERKYPLTDDFKVHHLEQRDIYRAKQKEKRIFLWTRRKNRALMILTPWNASTLHATNVELTKTRTAEINEAKQARKEIANKRRETQREMNRAAMQRLKQRRAEVKAKKKGLIDASPNEDTPSENEETKLSSPQVEPTTTAEPNREPSQED

SEQ ID NO: 1867 - DNA, 384 bp, Corynebacterium glutamicum
  CDS (101)..(361): RXA00656
ccttttaataacaatacaatgaataattggaataggtcgacacctttggagcggagccggttaaaattggcagcattcaccgaaagaaaaggagaaccacatgcttgccctaggttggattacatggatcattattggtggtctagctggttggattgcctccaagattaaaggcactgatgctcagcaaggaattttgctgaacatagtcgtcggtattatcggtggtttgttaggcggctggctgcttggaatcttcggagtggatgttgccggtggcggcttgatcttcagcttcatcacatgtctgattggtgctgtcattttgctgacgatcgtgcagttcttcactcggaagaagtaatctgctttaaatccgtaggg

SEQ ID NO: 1868 - protein, 87 aa, Corynebacterium glutamicum
MLALGWITWIIIGGLAGWIASKIKGTDAQQGILLNIVVGIIGGLLGGWLLGIFGVDVAGGGLIFSFITCLIGAVILLTIVQFFTRKK

SEQ ID NO: 1869 - DNA, 986 bp, Corynebacterium glutamicum
  CDS (61)..(963): RXA00657
gatcatgagtttccacgaactgtaacgcaggattcaccaatcaatgaaaggtcgaccgacatgagcactgaagacattgtcgtcgtagcagtagatggctcggacgcctcaaaacaagctgttcggtgggctgcaaataccgccaacaaacgtggcattccacttcgcttggcttccagctacaccatgcctcagttcctctacgcagagggaatggttccaccacaagagcttttcgatgacctccaggccgaagccctggaaaagattaacgaagcccgtgacatcgcccatgaggtagcgccagaaatcaagatcgggcacaccatcgctgaaggcagtcccatcgacatgctgttggaaatgtctcccgatgccacaatgatcgtcatgggttcccgcggactcggcggactctccggaatggtcatgggctccgtctccggtgcagtggtcagccacgcaaagtgtccagtcgttgttgtccgtgaagacagcgcagtcaacgaagacagcaagtacggcccagtcgtcgtcggtgtggatggctccgaagtctcccaacaggcaaccgaatacgcatttgcggaagctgaagctcgtggcgccgaactcgttgcagttcacacctggatggacatgcaggtacaggcatcacttgcaggtcttgcagctgctcaacagcagtgggatgaagtggaacgtcagcaaaccgacatgctgatcgaacgcctcgcaccactggtggaaaagtacccaagtgtaaccgtcaagaagatcatcacccgtgaccgcccagttcgcgcacttgcagaagcatctgaaaacgcgcagctcctagtcgttggttcccatggtcgtggcggatttaagggcatgctccttggctccacctcccgcgcactgctgcaatccgcaccgtgcccaatgatggtggttcgcccacctgagaagattaagaagtagtttcttttaagtttcgatgc

SEQ ID NO: 1870 - protein, 301 aa, Corynebacterium glutamicum
MSTEDIVVVAVDGSDASKQAVRWAANTANKRGIPLRLASSYTMPQFLYAEGMVPPQELFDDLQAEALEKINEARDIAHEVAPEIKIGHTIAEGSPIDMLLEMSPDATMIVMGSRGLGGLSGMVMGSVSGAVVSHAKCPVVVVREDSAVNEDSKYGPVVVGVDGSEVSQQATEYAFAEAEARGAELVAVHTWMDMQVQASLAGLAAAQQQWDEVERQQTDMLIERLAPLVEKYPSVTVKKIITRDRPVRALAEASENAQLLVVGSHGRGGFKGMLLGSTSRALLQSAPCPMMVVRPPEKIKK

SEQ ID NO: 1871 - DNA, 813 bp, Corynebacterium glutamicum
  CDS (101)..(790): RXA00661
cggatgcaagagaaccgtggtttcgctgatttttggcgaacccggaattaaggccccgaggattacatgcttttaaatcctttgaaaaggggacaagatcatgaatcctataaccgaattattagacgcaacactatggatcggcggagttccgattctgtggcgcgaaatcatcggcaacgttttcggattatttagcgcgtgggcaggaatgcgacgcatcgtgtgggcatggcccatcggcatcataggcaacgcgctgctgttcacagtatttatgggcggccttttccacactccacaaaacctcgatctctacggccaagcgggtcgccagatcatgttcatcatcgtcagtggttatggctggtaccaatggtcggccgcaaaacgtcgcgcactcaccccagaaaatgcagtagcagtggttcctcgctgggcaagcaccaaagaacgcgccggcattgtgattgcggcggttgtgggaacactcagctttgcctggattttccaagcactcggctcctgggggccatgggccgacgcgtggattttcgtcggctcaatcctggctacctacggaatggctcgcggatggacagagttctggctgatctggatcgccgtcgacatagttggcgttcctctacttttgactgctggctactacccatccgcggtgctttacctggtgtacggtgcgtttgtcagctggggatttgtcgtgtggctgcgggtgcaaaaagcagacaaggctcgtgcgctggaagctcaggagtctgtgacagtctgaaaagcgtttactaaatagaa

SEQ ID NO: 1872 - protein, 230 aa, Corynebacterium glutamicum
MNPITELLDATLWIGGVPILWREIIGNVFGLFSAWAGMRRIVWAWPIGIIGNALLFTVFMGGLFHTPQNLDLYGQAGRQIMFIIVSGYGWYQWSAAKRRALTPENAVAVVPRWASTKERAGIVIAAVVGTLSFAWIFQALGSWGPWADAWIFVGSILATYGMARGWTEFWLIWIAVDIVGVPLLLTAGYYPSAVLYLVYGAFVSWGFVVWLRVQKADKARALEAQESVTV

SEQ ID NO: 1873 - DNA, 685 bp, Corynebacterium glutamicum
  CDS (101)..(685): RXA00667
ggcatcagtgtttgaagggaaaagcaggtcaaacaaggtgcggctgatttgagcgatcacagcaccgagatctgtgctgaagaattcaatgattgggttgatgattgcgttgaagtccatgtctaacagggtagtacaaaagccaaaaatgaaagcgccgctacccatccgcgacggcctcaacccttcccgtgtgcgcttgccgctcgacgcggcgccgatccgcgccatcgattttgttgaatacctcatttccacgcagcgccaccgcaatccggccgacaacgccgaagcgcttcaagcgcgtttcgacgccgaccttgttgtcaaccactacggcgagccctacgcccccgacaccatggttcagcccgacgacgacatttggttctaccgcatgcccgccgccgaacggccgatcccttacaaaattcatgtcattcacgaagacgatgacatcctcgtcattgacaagccaccctacctagcaaccatgcctcgtggccgccacatcaccgaaaccgctctggtgaaaatgcgtgtgctgactggaaacaacgatctcaccccagctcaccgcctcgatcgcctgacttccggtgtgttagtcatggtgaaaaaaccagaactccgtggcgcttaccaaaccttgtttgcccgacgtgaggcgtccaaaacctatgag

SEQ ID NO: 1874 - protein, 195 aa, Corynebacterium glutamicum
MIALKSMSNRVVQKPKMKAPLPIRDGLNPSRVRLPLDAAPIRAIDFVEYLISTQRHRNPADNAEALQARFDADLVVNHYGEPYAPDTMVQPDDDIWFYRMPAAERPIPYKIHVIHEDDDILVIDKPPYLATMPRGRHITETALVKMRVLTGNNDLTPAHRLDRLTSGVLVMVKKPELRGAYQTLFARREASKTYE

SEQ ID NO: 1875 - DNA, 870 bp, Corynebacterium glutamicum
  CDS (101)..(847): RXA00676
ggtttgcgacctccccggcgtgccgccaggggaggaggcgataaaacttttttacctttcgaatatcaaaatcataaaacagccttatatacttcaacgtatggcgaagaattctcgaatccgatacagcgcgtcaatcaagcgtgccgcagctgcaatcctcaccgcagctgctacctcagtcgcgttgatcgctgtgccagcaactgcttcagcacaggacctcgcaaccggcagctcccagatccagactgatgctcgtgaaggtgcgtgggcaacccgcaacaccatccaagaccaacttgcctccattgggccagcagccctcccagtccgcgcagcggtagacaatgccatcaacggcatgttcccaggacttgttgatgaaaaggttgcagcagagcaggaagctgcacgcgcagaagctgagcgcgaagcagcagctgcacgtgaagcagaagcagcccgcgtagccgcagaagaagccgcacgctttgaccgcggctcttgcccagcaatcgctgatgtctgcgtggacattgatggtggacgtacctggctgcaggaaaacggtcaggtcacctacggtgcagtcccagtttcctccggcggagttggccaggaaacccctcgcggaacgttctacatcaaccgcaaggtcaaggatgaaatctcttacgagttcggtaacgccccaatgccgtacgccatgtacttcacctacaacggccacgcattccaccagggcaatgttgcgactacttccgctggttgtgttcgcctaaacactcaagatgccatctactacttcaacaacgttggcatcggcgacatggtgtacatctactaaaactcaccgttgctagcagg

SEQ ID NO: 1876 - protein, 249 aa, Corynebacterium glutamicum
MAKNSRIRYSASIKRAAAAILTAAATSVALIAVPATASAQDLATGSSQIQTDAREGAWATRNTIQDQLASIGPAALPVRAAVDNAINGMFPGLVDEKVAAEQEAARAEAEREAAAAREAEAARVAAEEAARFDRGSCPAIADVCVDIDGGRTWLQENGQVTYGAVPVSSGGVGQETPRGTFYINRKVKDEISYEFGNAPMPYAMYFTYNGHAFHQGNVATTSAGCVRLNTQDAIYYFNNVGIGDMVYIY

SEQ ID NO: 1877 - DNA, 858 bp, Corynebacterium glutamicum
  CDS (101)..(835): RXA00678
tgcgcagtgcactttccaggaaccaaaatatccccgccgaccttgctgcagatatttcgcagccgctgaaaaaactagccgttgacctggaggttacccgatgactcgcagtaatttacccgcttgggagcaagcagaccccagcgtccacgcctctgatccccgcgccatcacttttgcggaggattttgggattcgtcccatcccggccgtaggtccaattgataccaccgctatctgtgcaacaccttcaaatggatttgagcaattatggaaagccattgagccggaaacccgcacccgcgccaacgacattcatcttcccatcgtcgtggcgtacgctgaacgtctctgcgacgcttacccactggcagatagagaattggttctcgtagccgcaatcctccacgacacgggctgggcacatgtcgatgagagccgaatcatctccgaaggattctccggaaactggcgcaaagcagcaatccgcttcgaacacgaaacagaaggctgcactgtggcccgccgagtgcttccatccctcggatatactgtcgattttgtcgagcatgtctgcgacatcatcgacggacacgacacccgccaagtggcctactcactagaagacgctcttgttcgcgattgcgaccgactctggcgtttcgaccgcgccgggatcacggcttctagctcatggttcgggatgccagtctcagattatgtcgaccgcctgcacagggaaatcctcccagaattaatcaccgaagctgcacaccagatggctactgcagacctcaatcgtgcaaaggccctgttaagaacggatgcgatccgatgaatgctgcaaccaggcgtgct

SEQ ID NO: 1878 - protein, 245 aa, Corynebacterium glutamicum
MTRSNLPAWEQADPSVHASDPRAITFAEDFGIRPIPAVGPIDTTAICATPSNGFEQLWKAIEPETRTRANDIHLPIVVAYAERLCDAYPLADRELVLVAAILHDTGWAHVDESRIISEGFSGNWRKAAIRFEHETEGCTVARRVLPSLGYTVDFVEHVCDIIDGHDTRQVAYSLEDALVRDCDRLWRFDRAGITASSSWFGMPVSDYVDRLHREILPELITEAAHQMATADLNRAKALLRTDAIR

SEQ ID NO: 1879 - DNA, 1053 bp, Corynebacterium glutamicum
  CDS (101)..(1030): RXA00691
tgcagctgcagtcgcactatggattgttcttgccatatcgccatgggttccttctgcgcacgccttgaccacgccttgtgaagacgaccaagtgacagtgatggttgagggcaacaccatcggctgtgctgacgccggcggaaatggctatcaaacgcttcttgatgccggatttgatgtggaaaccaccgttcagtttccagaattcttgtgccgaatcaatgatttcccaggtcctgatgtggacgattgcatgaccgcatcacctgctgaagcttattggtcttattggcatgctcccctcggcggagatgaatgggaatacagcaaccttggagctttcctctactaccccaaacccggcactgttgaagcgtggtattggggagatactgatcgtcccggcgcgatcccggtgagtaaatctcaggcggagttggggttagactccgcggatccggattacaaaattgattttgatccaaatgatttcatcaccacaaccccaacctccgagtcccctatcgccgatttagggggtgacgaagagcccactgaaactactgaagctcctatcgcaggggctggagctggttcggcaagaggacaagcagctgaacccactgttgaggtaaaccctgagaaccctaatgaggtattggtgtatcaggattctgaaggaaactcgattactaaaggtcagtacgagaacttggttgctgcagcagccgctaagaccactgctgctgtccaagccccagctggggctggtgaagcaaatagccaaccgcaggcaacagcggtggcagaagctcctgaagttgatccgatgaccacgcaggttcttatggcgcctgcgggccaagatggagacgtcatggctgagggttcgacgcagcagacgtacgccacaggcacggtggattcttctgctcagggatggatcattggactcacactggctgtcatttccttggtttcagcgtctgctgtggcggcgtgggcgattcgtcgttcagaggtccagggttaaagcttcgtgaaatggattga

SEQ ID NO: 1880 - protein, 310 aa, Corynebacterium glutamicum
MVEGNTIGCADAGGNGYQTLLDAGFDVETTVQFPEFLCRINDFPGPDVDDCMTASPAEAYWSYWHAPLGGDEWEYSNLGAFLYYPKPGTVEAWYWGDTDRPGAIPVSKSQAELGLDSADPDYKIDFDPNDFITTTPTSESPIADLGGDEEPTETTEAPIAGAGAGSARGQAAEPTVEVNPENPNEVLVYQDSEGNSITKGQYENLVAAAAAKTTAAVQAPAGAGEANSQPQATAVAEAPEVDPMTTQVLMAPAGQDGDVMAEGSTQQTYATGTVDSSAQGWIIGLTLAVISLVSASAVAAWAIRRSEVQG

SEQ ID NO: 1881 - DNA, 1257 bp, Corynebacterium glutamicum
  CDS (101)..(1234): RXA00692
ccttaaagcggggtcagaacatttctccaattcattttaaggacatgttttcatggctcatctacgtgggaagagaaccattcgctggtctgctgcaaccgtggctttagcaaccggtgtttccctgttggctccacaggtcgttgctgcacaggatgcatcatcggatattcaattagctacccaattcatcgaaaaagaatttgcaacgaatggcctcatccctgggcctgtaggtactccagatattgggctcaatcaggatctgttgctgtccctaaatgcgcttgcccctgattctccagagatcgacgctgcatatgctgcaattgctccggagctcgagggctatgtctcagtttctgactacatcttcagcgatcgtctagccaagaccgtagctttccaagatgccctcggcgtcagagatgctgattttatcgcgcaacttgtcagcgctgttcaagaaaacggtcagatcaaaaacttagataatggtgaagccacaactgcaattaataacttcagccaggcctggggcgttctagctctgcaccgcgtcggtgaaaccgaagcagccgagcgcgcaacagaattccttaaaactcaagtgtgctccgacggtggtgtccaattagcctcagcaatcgaacctacatgcaaaaccacggattccgatgtcactgcaatggctgcacaggctttgactctggcaaatggtgcgcaggatccaaccacacaagccactctcgattacctcgtcaccacgatggatgagaccggtggtgtcaaaaatacttggaccggtgtgaattccaactccacgggaattgtcggatccgcttttgctcttgcgggcgatgaggaaaactacctcaaggctcgtgaatacctggcatctgttcaatttggcgaagatgcagacccatcgattcagggtggctttgctttcaccgtgaaggctaaggaaaccaacactgcgattagcgatcagattcgacgcgcaactggccaagcagcattaggttttgcaggcggtaactacgccaacgataaactgatcaccattgcgaacccagtagatccaactccagatccagaaattccaactcccccagctgattcagagggatccaccggtggaattggcggcgctggaattatcatcgccatcttggccatccttgccgccatcgctggtgtcatgggaccaatgatggctaacctgcagttttaacatctgagagaagtacagtg

SEQ ID NO: 1882 - protein, 378 aa, Corynebacterium glutamicum
VALATGVSLLAPQVVAAQDASSDIQLATQFIEKEFATNGLIPGPVGTPDIGLNQDLLLSLNALAPDSPEIDAAYAAIAPELEGYVSVSDYIFSDRLAKTVAFQDALGVRDADFIAQLVSAVQENGQIKNLDNGEATTAINNFSQAWGVLALHRVGETEAAERATEFLKTQVCSDGGVQLASAIEPTCKTTDSDVTAMAAQALTLANGAQDPTTQATLDYLVTTMDETGGVKNTWTGVNSNSTGIVGSAFALAGDEENYLKAREYLASVQFGEDADPSIQGGFAFTVKAKETNTAISDQIRRATGQAALGFAGGNYANDKLITIANPVDPTPDPEIPTPPADSEGSTGGIGGAGIIIAILAILAAIAGVMGPMMANLQF

SEQ ID NO: 1883 - DNA, 606 bp, Corynebacterium glutamicum
  CDS (101)..(583): RXA00693
tccatcagccctcccccgcgtgccccacgcggggcacggttagcgctgctaacctggcccgatgtacaaattaatctcaccgcatttgtcaggccacgccatgtggaaagaggctttggaagaattcggatcaggccccatccacggctcgggttatttcgagaactatcttcccatcgactattccgaagcaggatttcaccactacctcaaggagcgcactgacgcggccgatccttcggttccaccaccggaaggttttgtgcactgcagctatttctggatcgttgatgatgacgatgttcttgtcggattcttagctttaaggcacgagctgaaccaacatctcctggaagtcgcgggccacattggttacggcgtgcgcccgtctgcgcgtcgaaaaggtgctgcaaccgcagcgctgaaactcggtgttcatgaagctcaggccttgggcatcgacaaggttttgctgtgcgtcgcaggagataacgaagcgtccaggaacgtcatcgaaaagtgcggtggagtttatgaatccacgatccgtggaatgcgacgctattggatagccacagattcttaaaaaatcttcgcaagaactta

SEQ ID NO: 1884 - protein, 161 aa, Corynebacterium glutamicum
MWKEALEEFGSGPIHGSGYFENYLPIDYSEAGFHHYLKERTDAADPSVPPPEGFVHCSYFWIVDDDDVLVGFLALRHELNQHLLEVAGHIGYGVRPSARRKGAATAALKLGVHEAQALGIDKVLLCVAGDNEASRNVIEKCGGVYESTIRGMRRYWIATDS

SEQ ID NO: 1885 - DNA, 498 bp, Corynebacterium glutamicum
  CDS (101)..(475): RXA00701
aagagacgatggcgtataggacgatgatgagcatttcctttttgccgcgtacttgggggagtaggccggcgccgaagctgacccaggcggctgcgagcatttggtaggggagccacggtccgattcctgcggtgagcagcgcggatgcgaacagtccggtgttgccgaggatgaatccgaagccgggtccgaaggctcgtccgccgaggatgaggacaaagaagactgcttcaaagcctgctgcgccggcaccgaatggtcggactacggcaaccatggcggtgaggacgccgagcatggctacggctttaacgtcgaatccgttttcactgatttcggcgatgacagcggccagcacgaggggaatgacgatcgcgatgtagaggggcgcttgggctttgtcggacaggaaggattccgggttgacgatcagcggccagaagaaaatcacgatgctcaaaaccgcaaggaagcttaaggtgaggaaggttttgggct

SEQ ID NO: 1886 - protein, 125 aa, Corynebacterium glutamicum
LVGEPRSDSCGEQRGCEQSGVAEDESEAGSEGSSAEDEDKEDCFKACCAGTEWSDYGNHGGEDAEHGYGFNVESVFTDFGDDSGQHEGNDDRDVEGRLGFVGQEGFRVDDQRPEENHDAQNRKEA

SEQ ID NO: 1887 - DNA, 1095 bp, Corynebacterium glutamicum
  CDS (101)..(1072): RXA00707
tagttaaaagcacttaccttaactggtaggtgcttttttcatgtctacgcagtgggtaactttcagaggaaaattacccaaccaaaacaaaggaactttcatgaacgtgcaacgcaaactgctggcgatcgtaggggctttcatggcagggtctttagccttgggaacaccaactgcacaggcccaaagcattggcagcagtgcctcacagagaactgaagtcttacgtgggctgacctcatctgccggaataccagatgccacagcgccggaaggcggggcaaaagtcgtggtctttggagattcacatgcatcaggaaccaatgcaccatttgatgtggatgaacgcggctgcctcaaggggaaccaatcgtggcctgatcaattgcaagcacaacaaggattgcagcagggggagctcattgacctttcctgcaacggcgcctccatcaactcgacgggtttccacttttccgatgaagttcggcatgcagaagcactaggggccattggaccaaataccgagaacatcttcatccaatttggcaagaatgatcagtggggacactcaccaatcaatttgcgctattccgtgatcaactgcctttttgatgcggccaacggatgcggtgagaaagctgtagcggctggaaccatgcaggatccctcctcggtcaccggcgaaaactatgctcagcggatgaaacctgtcatcgactacctcaagtactacgctccaaatgcgcagatcacgttgctgggataccaggaatacaccccacgaagcggaagcgagatttgtgtccgcgtgggaggtacggaactaaggaaaccagacgccaccaacctggtgtcctatatgaacaatcttgagtcggccatttttgaagcctctgagattcttgacgtccagcatgccaatctccgtgaggccactgcaggacacagcagctgctcagctgaaccgtgggtcaacggagtgctggatatgcgggtaaacgctgtaggaggcacctggcacccatctccaaagggagatgaagtgaccgcgggcctcctcggaaccttgatgtaactatctagaattcttcatag

SEQ ID NO: 1888 - protein, 324 aa, Corynebacterium glutamicum
MNVQRKLLAIVGAFMAGSLALGTPTAQAQSIGSSASQRTEVLRGLTSSAGIPDATAPEGGAKVVVFGDSHASGTNAPFDVDERGCLKGNQSWPDQLQAQQGLQQGELIDLSCNGASINSTGFHFSDEVRHAEALGAIGPNTENIFIQFGKNDQWGHSPINLRYSVINCLFDAANGCGEKAVAAGTMQDPSSVTGENYAQRMKPVIDYLKYYAPNAQITLLGYQEYTPRSGSEICVRVGGTELRKPDATNLVSYMNNLESAIFEASEILDVQHANLREATAGHSSCSAEPWVNGVLDMRVNAVGGTWHPSPKGDEVTAGLLGTLM

SEQ ID NO: 1889 - DNA, 1056 bp, Corynebacterium glutamicum
  CDS (71)..(1033): RXA00713
aaccacgcctccttgtgcgggcctgtcagtaactgttatcgcaggttcatgcgttaaggtgtggaagaccatgacaaaagtagcggagctggaccaagagtggtccgaagtagatgacgcggaattagacgcgcaaagcgctggcacttctgatagttccagcacagacgacttcgctgacgcagaaaacacttctgaaaatctgggacccatcggcccagaaccactccctgaaccagatggggatgttccggcatcgggtttccaagtgcagctcgataattttgaaggtccttttgaccttctcctgcagctgattaccaagaagaaacttgatgtcactgaagttgccttggcccaggtgaccgacgagtttattgcttacacccgaaaactgggcgaaaccagcgatttggatgagaccacagagttcttagtggtggccgcaacgctgttggatcttaaaacagctcgcctgctcccgcgtggtgaagtcgacgatgaagatgatctcgaattgctcgaaataaaggatctccttttcgccaggttgttgcagtatcgcgcttacaagcaagttgcggaaatgtttgcgcaatggcagcgagatgctcgacgcaggtacccgcgcgctgtctcattagaaactcagtttgccaacctcttgccgcccgtttccttgggtcattccttaaaaagtttcagcgagttggctgctgtggtgtttcgtccgaaacccccagagacggtgaaaacagatcacgtgcaccaagttgcggtgtcagttccagagcaagcgggcaggattcttaacacgttgaaacttgccggaattgatcattatttgagctttcagctgctcacacgtgattgtaccgcgtcaatggaagtgattggccgcttccttgccttgctggaattgtataaggcacgcgctattgaaaccttgcaagaagagccactcggcgagcttaaagtttcgtggactggcattgatgtcgatccagcagtcgtcgcggcgagtgactgggagtaatcagtttttcttaaggaaac

SEQ ID NO: 1890 - protein, 321 aa, Corynebacterium glutamicum
MTKVAELDQEWSEVDDAELDAQSAGTSDSSSTDDFADAENTSENLGPIGPEPLPEPDGDVPASGFQVQLDNFEGPFDLLLQLITKKKLDVTEVALAQVTDEFIAYTRKLGETSDLDETTEFLVVAATLLDLKTARLLPRGEVDDEDDLELLEIKDLLFARLLQYRAYKQVAEMFAQWQRDARRRYPRAVSLETQFANLLPPVSLGHSLKSFSELAAVVFRPKPPETVKTDHVHQVAVSVPEQAGRILNTLKLAGIDHYLSFQLLTRDCTASMEVIGRFLALLELYKARAIETLQEEPLGELKVSWTGIDVDPAVVAASDWE

SEQ ID NO: 1891 - DNA, 684 bp, Corynebacterium glutamicum
  CDS (101)..(661): RXA00714
cgtcaatcaagctgtcaaaaaaaatacaagttaggtcacaaaatgatttcagtcgtgagaaccatcacatataagacatctcatgatctaacatttcttcatggctacgattacacgcaccgacagactgatcctcgtaccgctcactgttgagctcgaagacgaggcccaccagatttactctgattctcgaatctgggaacaccgcccccaggcgcgtcacaccaacgtgcgtgtcacgcgcgacatcatcaagcgcaccaatgaaagctggggcaagaaagaccttggcccctggggtgtttacctccgtgaccgcccatcggaattcgttggcgttggtggcgttgaactcatcgacggaaaagtatgggacctcaagtaccgcctccgccccgacctatggggcaatggatacgccacggaaatctccaacgccgcaacactggccaccaagcgtatcgacgacagcctcccactcacggccagggtgactaccaaccaccctgcctcattccgtattttggaaaaactgggactcacccccgtatgggaaggccgacgagtcggaacggaagatgaccccaacgagcctgatgtgagaatttattctgaccgtccgctatcggatgaaattcttgaaatgctcaagcaacgaccatagaccagaaaatctcacccctt

SEQ ID NO: 1892 - protein, 187 aa, Corynebacterium glutamicum
MATITRTDRLILVPLTVELEDEAHQIYSDSRIWEHRPQARHTNVRVTRDIIKRTNESWGKKDLGPWGVYLRDRPSEFVGVGGVELIDGKVWDLKYRLRPDLWGNGYATEISNAATLATKRIDDSLPLTARVTTNHPASFRILEKLGLTPVWEGRRVGTEDDPNEPDVRIYSDRPLSDEILEMLKQRP

SEQ ID NO: 1893 - DNA, 636 bp, Corynebacterium glutamicum
  CDS (101)..(613): RXA00716
aaagccgattgcttaacgcccgctatgataaccactcatgaatgatttcgatccagcattgatttccgcgatgagccttatccctcagacgaggtctcggatggaatcaatcttgttggtggtcgataccccagtttcagcacgcacgctggctggggtgttgggcattgacgtgcctgcaacagaggcaattttgaaggaaatggcctttgagctttctgaacggggcagcggcattgatctgcgggaaacggcagaaggatggcgctattacacccgcccggaaaatgcggacatcgtcgagcaattcctcctcgatggaaaccaaaccagactgtcccgtgcagcattggaaacactcgcggtggtggcatatcggcagccggtcacacgctcccagatttcagcagtgcgcggagtaaatgtcgacggcgtcatgagaaccttgcagcttcgaggcctagtcaaagaagtcgatgtggacgaatcaacgggcgcacaccgctatggcacaacggaattgctgcttgagctgttgggtattgattctttggataaattaccagatctagcaccgcttttgccggatgttgactccattgatgaagacttctaaagcatcagttaaagccccga

SEQ ID NO: 1894 - protein, 171 aa, Corynebacterium glutamicum
MESILLVVDTPVSARTLAGVLGIDVPATEAILKEMAFELSERGSGIDLRETAEGWRYYTRPENADIVEQFLLDGNQTRLSRAALETLAVVAYRQPVTRSQISAVRGVNVDGVMRTLQLRGLVKEVDVDESTGAHRYGTTELLLELLGIDSLDKLPDLAPLLPDVDSIDEDF

SEQ ID NO: 1895 - DNA, 1752 bp, Corynebacterium glutamicum
  CDS (101)..(1729): RXA00719
cagatgatgcacacatcgtggacacctctgatatgaccatggatcaagtacttgatcacctcatccacctagtggaagcctccgctgaaaggagcaaccagtgactgataaacacaccatgcctggtgaagaggacgacaccgtattcgtctaccacacccacaaaggcgaaatggacgtcgaaggtgcgtttgctgacgaagaagaactagcaccacacggcggttgggcttccgcagatttcgacccagcagaattcggctacgaagactctgacgatgacttcgatgcagaggactttgacgaaacagagttctccaaccctgatttcggcgaagactactctgatgaagactgggaagaaatcgagaccgcattcggattcgacccaagccaccttgaagaagctctctgcacggtcgctatcgtcggacgcccaaatgttggtaaatcaaccttggtgaaccgctttattggacgtcgagaagcagtcgtggaagatttccccggcgtaacccgtgaccgcatctcctacatctctgactggggtggacaccgtttctgggttcaggacacaggcggatgggatcctaacgtcaagggcatccacgcatcgatcgcacagcaagcagaagttgctatgagcactgccgatgtcatcgtattcgtcgtggacaccaaggtgggcatcaccgaaactgactcagtgatggcagcaaaactgttgcgctcggaagtgccagtgatcttggttgcgaacaaattcgactccgacagccagtgggctgacatggctgagttctacagcctcggccttggcgatccatacccagtttcagcccagcatggacgtggtggcgctgacgttttggacaaagtccttgaactcttcccagaagagcctcgctccaagtccatcgtggaaggccctcgtcgtgtcgcccttgtgggtaagccaaacgtgggtaagtcttcactgctcaacaagtttgctggcgagacccgctctgtcgtggacaatgttgcaggaaccaccgttgaccccgttgactccctgattcagctggatcaaaaactgtggaaattcgtggatactgctggtcttcgcaaaaaggtcaagactgcatctggccacgagtactacgcatcactgcgtacccacggtgccatcgatgcagctgagctgtgtgttttgcttatcgattcctccgaacccatcaccgagcaggatcagcgcgtgctcgcaatgatcaccgatgccggtaaggcactggttattgcgttcaacaagtgggatctcatggatgaagatcgccgcatcgatttggatcgcgaacttgatctccagttggcacacgtgccttgggcaaagcgcatcaacatctccgccaaaaccggtcgtgcactgcagcgcctcgagccagcaatgttggaagcgctcgacaactgggatcgccgtatctccactggtcagctgaacacctggctgcgtgaagcaattgctgcgaacccaccaccaatgcgtggcggacgtttgcctcgagtgctgtttgccacccaggcatctactcagccaccagtgatcgtactgttcaccaccggcttcctcgaagcaggttaccgacgatacctggagcgcaagttccgtgaacgtttcggctttgaaggcactccagtgcgaatcgctgtgcgtgttcgcgagcgccgcggcaagggcggaaacaagcagtaaagcttgattttccctaaaag

SEQ ID NO: 1896 - protein, 543 aa, Corynebacterium glutamicum
VTDKHTMPGEEDDTVFVYHTHKGEMDVEGAFADEEELAPHGGWASADFDPAEFGYEDSDDDFDAEDFDETEFSNPDFGEDYSDEDWEEIETAFGFDPSHLEEALCTVAIVGRPNVGKSTLVNRFIGRREAVVEDFPGVTRDRISYISDWGGHRFWVQDTGGWDPNVKGIHASIAQQAEVAMSTADVIVFVVDTKVGITETDSVMAAKLLRSEVPVILVANKFDSDSQWADMAEFYSLGLGDPYPVSAQHGRGGADVLDKVLELFPEEPRSKSIVEGPRRVALVGKPNVGKSSLLNKFAGETRSVVDNVAGTTVDPVDSLIQLDQKLWKFVDTAGLRKKVKTASGHEYYASLRTHGAIDAAELCVLLIDSSEPITEQDQRVLAMITDAGKALVIAFNKWDLMDEDRRIDLDRELDLQLAHVPWAKRINISAKTGRALQRLEPAMLEALDNWDRRISTGQLNTWLREAIAANPPPMRGGRLPRVLFATQASTQPPVIVLFTTGFLEAGYRRYLERKFRERFGFEGTPVRIAVRVRERRGKGGNKQ

SEQ ID NO: 1897 - DNA, 671 bp, Corynebacterium glutamicum
  CDS (1)..(648): RXA00724
atcggtgaggaagtcctcgccggacgccaagcctatgtggtgtgtccgcgcattgaaggcgaaggcggcgtgctggaaatccacgcctatctttccgaacaggtatatccaggattgaatgttggaatgctgcacggtcgcatggacacggatctcaaagattcggtcatgcaggaattcgcccaaggtgagatcgatattttggtcgccaccacggtcattgaggtcggtattgacgttgccaacgccaccgtcatgctcatccgcgaggcggaacgcttcggcgtttcccagatccaccagctgcgcggccgtgttggccgtgggcagcacgattccctctgcctgctgcacaccaccttcgacgaggactccccacaaggccaacgcctcgccgcaatttccaccacaaccgacggttttcaactctctgaacttgatttgcaggtacgccaagaaggcgacgtgttgggcacccgccagtccggcagcgacaccaaactccgtcacctctcgtttatcagcgaccaaaaaatcatcgagcgtgcgcttatcgacgccaccgagctggttgccgccagccgttccagggcgcttgagctggtcagcgacatcgcaatgatcaaccaggaatacctggaaaagagctgatattgatagggtttaagtca

SEQ ID NO: 1898 - protein, 216 aa, Corynebacterium glutamicum
IGEEVLAGRQAYVVCPRIEGEGGVLEIHAYLSEQVYPGLNVGMLHGRMDTDLKDSVMQEFAQGEIDILVATTVIEVGIDVANATVMLIREAERFGVSQIHQLRGRVGRGQHDSLCLLHTTFDEDSPQGQRLAAISTTTDGFQLSELDLQVRQEGDVLGTRQSGSDTKLRHLSFISDQKIIERALIDATELVAASRSRALELVSDIAMINQEYLEKS

SEQ ID NO: 1899 - DNA, 164 bp, Corynebacterium glutamicum
  CDS (1)..(141): RXA00726
cacgaaatgggcttcgcccacgaagtcgccgaccaggtcgtgttcatggccgatggagttgtcgttgaagccggaacccccgaacaagttctggacaatccaaaggaacagcgcaccaaagacttcctgtcttctctgctctaaccttttcgggtcttaaaaaa

SEQ ID NO: 1900 - protein, 47 aa, Corynebacterium glutamicum
HEMGFAHEVADQVVFMADGVVVEAGTPEQVLDNPKEQRTKDFLSSLL

SEQ ID NO: 1901 - DNA, 702 bp, Corynebacterium glutamicum
  CDS (101)..(679): RXA00740
gttataaatattaaagtacgctaaccatgggtgcagggggagacttctacagcagtcatggtccacaccacgactgctgtatatattaaggacgtaactcatgttgaagaataaaactcttgcgctgctggctgtcagtacgctgatgtttggcttatctgcttgctctagtgatgctgacggcccggacagtagcggtgctagtagtagcagtactggctcatcttctgcatcggctgacacaacagattctgcagctgttgataaggatgctcaattagacacctttatgcgttctgctgtggctgatggatcatctgctgctgtggctgtggacaacgctgtaggtaagggctttgataaagctgatgcgcaggcggctgcggagcgcttgggtgatggtttccaattcgctgcggattaccaggctgttggctatttggaatcttggtactttggtggcgcgcgaagcgagaagcttgacgaggtgcgtagtgatgtcatcgctcatttgtctgaattgggatttacagatttagaggctgaatcctcggcatctcgtattacattaggtgattactgtgatggggtccctgagtattgtgagttgttttttgatggcgaatctcctgacttgtatgacatgggtacggagcttgactcgtataagcccactgaataaagctatttcacttaaagcac

SEQ ID NO: 1902 - protein, 193 aa, Corynebacterium glutamicum
MLKNKTLALLAVSTLMFGLSACSSDADGPDSSGASSSSTGSSSASADTTDSAAVDKDAQLDTFMRSAVADGSSAAVAVDNAVGKGFDKADAQAAAERLGDGFQFAADYQAVGYLESWYFGGARSEKLDEVRSDVIAHLSELGFTDLEAESSASRITLGDYCDGVPEYCELFFDGESPDLYDMGTELDSYKPTE

SEQ ID NO: 1903 - DNA, 1056 bp, Corynebacterium glutamicum
  CDS (101)..(1033): RXA00741
tggtgatcactaggtccacctcgtcttgcatggtggtcacctcagtccagaacgcattgattgacaccgatcaaatgtttgatggattatgatatttagcatgactgattctctgcttgtatccatcagaaaaggcttaatagaagagcgtccattaacggagcttcttcgggcgtgtatcttccttggaagtgatactaactcggactctttacaagagtgggcgaaaaatgaattaaatggttatggctccattgatggtattccggaatatcgcaaattgaaaggacctcctgtattcgcgaaaattcaagctggtaattcaataatgtctaatatggtactggggccacataatgttcctgaaagagctcgtaagtatttccctgaagagctgcattttgatcagccgattcaaacgctaattgaatggtcgactaggcaggatgggattaatttatcgcccccgaatttacttcgggtccgcgatcttcataatgatcagtacgcgccattaaatcaaattttgaatttaaatgtttacttagataactcttatttttcgggaattgtggaccgcatccgaactctaatgacttccatgattgccgacctcacacacgcaactcctctggatgaactaccaagcagcgaaaaggttaatgccacggtcatgaagcacattgaaaataactacgaaactacaatcactcaagccaatggagctgtagccattggtaacagcgctaaagctgtgcagaagggattgtccgtggatgacctactgaagattatgcagaccattaatcctgaaaagttcgacttaggggaagctagagctgaagccgaagaaagcattcaatccatcgcggatgagttgaagaaggagtctccgaataaaggttttatccagaatgcttttgaaaagttgaaggaactcagcataaaagccggcgataaagccttcactacaatgttaaatcttgtaggtaaacagataatcgaaaacatcccacaactggtttcaggtggctagagaaattcaaggccgtcagc

SEQ ID NO: 1904 - protein, 311 aa, Corynebacterium glutamicum
MTDSLLVSIRKGLIEERPLTELLRACIFLGSDTNSDSLQEWAKNELNGYGSIDGIPEYRKLKGPPVFAKIQAGNSIMSNMVLGPHNVPERARKYFPEELHFDQPIQTLIEWSTRQDGINLSPPNLLRVRDLHNDQYAPLNQILNLNVYLDNSYFSGIVDRIRTLMTSMIADLTHATPLDELPSSEKVNATVMKHIENNYETTITQANGAVAIGNSAKAVQKGLSVDDLLKIMQTINPEKFDLGEARAEAEESIQSIADELKKESPNKGFIQNAFEKLKELSIKAGDKAFTTMLNLVGKQIIENIPQLVSGG

SEQ ID NO: 1905 - DNA, 1773 bp, Corynebacterium glutamicum
  CDS (101)..(1750): RXA00742
agaggggttttttagtgaaaatgataaaaccacttttacagatggacacatagatattagtaatgatgcttctggagctaagcgtagctttgggggtcgggtgaatgttcagattaaagggcgaaaggttaatgccaaggctgccgacttaaatagctatccggtctcagtagttgatctacgaggcttcgtgacactggctggtctcttattttttgtggttgatattgataagaaatcaaataagaaatatccaaagtatgttcttttgaaaccgttttatattcatgatctactgagtaaagcgaagccgggccaaaagacaattagcgtccgcttaaaacggttaccatctgatgaagatcgaatggaagccataatcgcattagcgctcgcatcgaggcaagaaaagatagtcgagaaccccagtaactatctctatgaaaatatggaatcaattactgttaaatcggctgaaccccttaatagggataagctggctgtatatgatggtagttcgccagaccattcgatcattattcgtactggggatggaattgaacagttcgtcaatgccaccgtagaaataatacccccgaatatgcagtttcatcaagccaattataatgtttcgtgtaatggggtcgtctatgacaatgttttgcatcgaaacattgatgatgagcacattgaattgaaaatcggaaaggggattactctccgcctacaaaagctcgccattgatgctccggggagcgttacggttgagtttcaagatagtcttcctgaacggttaaaagacattgagttcttcctaggagtgcttcaggcgaatacgttttttattaatgaagaacctgttgtgttgaagattaactcgaaccggactgtggctgaccttaaggatgaagcgggtgttcttcgtcagttggtagaaatagctaaccatttcaatattgatccgtcccttattcgaattggtgagattacagaaaaacagttctggcagttggatattgtgtatcgaacagccgttaagggagaatacgtaaagaatttagaggttaaagatgagactagacttatattgcagccttttggtcgttggaatcttgcgttgatagctcaccctggtgatgttgcaggggagtggacttatcatgaagtaatttccaagcgtcatcattttgctatgacaccttcaacggatcggagcgactcctcaatcgagcgagtgacgccgtacgagctcattgataatcgatggcttccatcagtattgaatctgcatttggataagcttgttgatttctattcagcgcttgaagaaactgttgatgttgataatctcgccacatggatggtgcttcgcctaattaaggcagctgattctgagcagagcaggaaaactgcatttcttatagcagctcaagctctcaatgattggctcgtggaacgagatcgagaagagtcgccaatttacaggcttaatggttggcaaattttgtatcgccaaactggattactggattcacaaagaacagaaattcgatcttttaggcataatcttgatcaaacaatgcacccagacaactatagcgagattatgattggttgcgctttgcttcttgacgatagagaagaggcgaattttttgcttactcagctttcggttgatcgacgcgcagtttttaatgaatggccgatagctcaattgatgacgggtgccctaaaagaagagattgaaaaatgagttctgagatcttgatttaa

SEQ ID NO: 1906 - protein, 550 aa, Corynebacterium glutamicum
VNVQIKGRKVNAKAADLNSYPVSVVDLRGFVTLAGLLFFVVDIDKKSNKKYPKYVLLKPFYIHDLLSKAKPGQKTISVRLKRLPSDEDRMEAIIALALASRQEKIVENPSNYLYENMESITVKSAEPLNRDKLAVYDGSSPDHSIIIRTGDGIEQFVNATVEIIPPNMQFHQANYNVSCNGVVYDNVLHRNIDDEHIELKIGKGITLRLQKLAIDAPGSVTVEFQDSLPERLKDIEFFLGVLQANTFFINEEPVVLKINSNRTVADLKDEAGVLRQLVEIANHFNIDPSLIRIGEITEKQFWQLDIVYRTAVKGEYVKNLEVKDETRLILQPFGRWNLALIAHPGDVAGEWTYHEVISKRHHFAMTPSTDRSDSSIERVTPYELIDNRWLPSVLNLHLDKLVDFYSALEETVDVDNLATWMVLRLIKAADSEQSRKTAFLIAAQALNDWLVERDREESPIYRLNGWQILYRQTGLLDSQRTEIRSFRHNLDQTMHPDNYSEIMIGCALLLDDREEANFLLTQLSVDRRAVFNEWPIAQLMTGALKEEIEK

SEQ ID NO: 1907 - DNA, 546 bp, Corynebacterium glutamicum
  CDS (101)..(523): RXA00743
attttggcgtagtgtttcgggttttataggttgagattgaaataccaagacaaggatggacatcatgtcagcgcatctaccttctcatcatgatgagttagtgcagcacttagttcttgcggatgtaaagtatcgggagctcagtgcgttatcggtcaaaattgaggaaccatcagatcgtcctgagtttaaacttggagttactgttaacgacaagagtaaagacgaagaaggtgtgccgcgaatcattgaggtttcattgagggtgtccatcgaggttcccgacggaaagataacggtagagcctgaagcaatctatttgattcctgagaataaggtttatttaacggaatctgatgcaatggtggattattttaacaaccatgcgatttttactctggtgccatatgcacgacaggccgtgtctgatttagggcagcgtgcattccacacgcagatcctcatgcctgcgttaggtcctggtgatttggtttttagtaaatcgacggcctcacgagaatggtagagaattacctgatagttgca

SEQ ID NO: 1908 - protein, 141 aa, Corynebacterium glutamicum
VQHLVLADVKYRELSALSVKIEEPSDRPEFKLGVTVNDKSKDEEGVPRIIEVSLRVSIEVPDGKITVEPEAIYLIPENKVYLTESDAMVDYFNNHAIFTLVPYARQAVSDLGQRAFHTQILMPALGPGDLVFSKSTASREW

SEQ ID NO: 1909 - DNA, 657 bp, Corynebacterium glutamicum
  CDS (101)..(634): RXA00745
tttgacgtgggatggccacaccggtgacggggtcaatgtgcagaatctgtgcagtggtgagttcagcattgttttccgcatcagataacgcggtgggcgagtggcttatctgtacggatctgccgatgggatgcttaatacagatggttttaatatgtttccgcgtgcgtcgtacaccattcttggccctatggatgctgacgcggtcggtgtgtaccaacagctactgaacagcacgattcccatggatttggcacgtcttgtaaccacgcataattccggtgcaagttatcttcgccgcggtgctaccaacgtagtttttgaaacgaatcttgccctcggtgtgaatccgtatatgaagaaacgccgagcaacagaagcacaacgtggtaagaagcgttttaaacgagacagtcattacggcggtggcactgtgaccacaggtactgctgatttggatgtggtggcgatgcaggcgcgggcagagcaccgggaagaaaggttgggagaaaaatctacccgcaagaaagaggagcttgctgcagtagaggcgaaagagttagctgcgaagaagggtccgcagactgtggaagaaggtcttgctgcggtggagaagaaacacctggcgaagcggtaggcgacgtggttggcggtggg

SEQ ID NO: 1910 - protein, 178 aa, Corynebacterium glutamicum
VAYLYGSADGMLNTDGFNMFPRASYTILGPMDADAVGVYQQLLNSTIPMDLARLVTTHNSGASYLRRGATNVVFETNLALGVNPYMKKRRATEAQRGKKRFKRDSHYGGGTVTTGTADLDVVAMQARAEHREERLGEKSTRKKEELAAVEAKELAAKKGPQTVEEGLAAVEKKHLAKR

SEQ ID NO: 1911 - DNA, 1314 bp, Corynebacterium glutamicum
  CDS (101)..(1291): RXA00746
aaactacgttggtagcaccgcggcgaagataacttgcaccggaattatgcgtggttacaagacgtgccaaatccatgggaatcgtgctgttcagtagctgttggtacacaccgaccgcgtcagcatccatagggccaagaatggtgtacgacgcacgcggaaacatattaaaaccatctgtattaagcatcccatcggcagatccgtacagataagccactcgcccaccgcgttatctgatgcggaaaacaatgctgaactcaccactgcacagattctgcacattgaccccgtcaccggtgtggccatcccacgtcaaaacattctgctgggtgaggattttcagactatggccagctcttttagtcaaatccgccatggatggggtatcacccagctcatcggacaagaccccaacagaaaccaaccaatccgctctgctgatacgtggacagtgactggatcgactggactcaccggctttaatactgctacgcataatacagatgacacagacgccactgccgcatataccatgccggcaagcgatcctgccgtaggactatgcgcactggaatccaacaaagacgcaccggtggatgaatttcgcgatctcagcctcagtgctttacgtaccgctacggtcatgtcaagctctggctccgccgtgattactatgcatgatcctatggtcatgagcaccactggcgcattggaagcacgtgcatacgttgacggcgaagtcatcaaccagcacgatcttgactcactgcgtgaccagctaggtattactacagacagcgcagataccacccctgccctacctgctgatcccttggcagcattgggcttgagcacaccaactacatcagctcttgtcccaggtcttgccgagctggactgcctcaacactgatcaagctcgcacctggcatgaccgtgacaacagcattggcactggtaaaccagctattcttgccgtgattaacgccgagctcgctgatgattacaccctgcagatcctcaaaaatagcactgcgacccccaccgactccaccgactccagcgatactgctgaacgcttcgtagcgcagctacctgcggaaacagcctttgtgcttattgatccggacatcggcgctgtgaccgatctgttctttatcaacagcataaatcaggatctccccgcaccgacaacccagatcaactcagtagcggtagatcaacgtgaccccaacatcatctacgcgacctttgccaatgatgaccgcgtgtaccagctcatgctgggttaaccgcgacccgtttttatctg

SEQ ID NO: 1912 - protein, 397 aa, Corynebacterium glutamicum
LVHTDRVSIHRAKNGVRRTRKHIKTICIKHPIGRSVQISHSPTALSDAENNAELTTAQILHIDPVTGVAIPRQNILLGEDFQTMASSFSQIRHGWGITQLIGQDPNRNQPIRSADTWTVTGSTGLTGFNTATHNTDDTDATAAYTMPASDPAVGLCALESNKDAPVDEFRDLSLSALRTATVMSSSGSAVITMHDPMVMSTTGALEARAYVDGEVINQHDLDSLRDQLGITTDSADTTPALPADPLAALGLSTPTTSALVPGLAELDCLNTDQARTWHDRDNSIGTGKPAILAVINAELADDYTLQILKNSTATPTDSTDSSDTAERFVAQLPAETAFVLIDPDIGAVTDLFFINSINQDLPAPTTQINSVAVDQRDPNIIYATFANDDRVYQLMLG

SEQ ID NO: 1913 - DNA, 711 bp, Corynebacterium glutamicum
  CDS (101)..(688): RXA00747
tgtgctgatccgcgccgtgccaactcgcactgggtcgcactgggtcgcacaaccgcatacacatacacacaattaatcaccctcaacacgaagatttatcatgacatttttgcaccgttccgccagtttccaccctcgtacccacgatcacctcagcgagctcggtcttgatccttataagctctctcaagacatccccactgttatttatgaagtccagccgcacagtgtgttcattttaaaattcaacactgccgatgttcgggtctatcaggaacactccgatctctttgtgcgacatgctgtgcttgttgatccagaacagcgtaaacatgagcatgaccagctccttaaagagattctcgacctcgatgcccctcgtgtcaacgatgatattagtggtcgcacgacagtgtttctccacgataaaacagttgttacgcacagtggtggccccattgcgattattccgcacaatcccgatgtcgccagcgccgctgcgtcagctaataaacacaaacaatctgtgatgacaacatccaggcatccttatgcgcagatgtctctcagcgacatgctgaaacaaggcttcacgctcacacctctagagttcccctactgcgctgttgatgaccccgacagctcacgccacacaatgcacgtcatcaacgttcgagatcatacagtgtgaactaccgcgccgctagagat

SEQ ID NO: 1914 - protein, 196 aa, Corynebacterium glutamicum
MTFLHRSASFHPRTHDHLSELGLDPYKLSQDIPTVIYEVQPHSVFILKFNTADVRVYQEHSDLFVRHAVLVDPEQRKHEHDQLLKEILDLDAPRVNDDISGRTTVFLHDKTVVTHSGGPIAIIPHNPDVASAAASANKHKQSVMTTSRHPYAQMSLSDMLKQGFTLTPLEFPYCAVDDPDSSRHTMHVINVRDHTV

SEQ ID NO: 1915 - DNA, 567 bp, Corynebacterium glutamicum
  CDS (101)..(544): RXA00748
aagccttattctcctcttaactaccatgaggtaaccatctaaagtagatggttgcaacaacttttcattacatcaacatgtttaaaaaaggacactgattatgacttacttcgcactcgttgctcgcaattacgctgagacaggtgtctctgttgaattccatgaggtcgatgatgacgcagataactcaaatggccccaacaacacaagcaatttacctctaaaacttcttcgagatcactcttttgatgccactgttgtctatggtgacctggtgcttcacacctcagcacatctcagagatacggctatcgccaactcagacaaccgtccgcgagtagtgaccacagctcaaaaattctttgattacatccgcttagccaccagacacggtgctatccacgacatgatcaataacgcgccagataccggcactgacatcgttgttattacggccactaatgatgctcttattagtgatgaatcagaatactatgacgagctttttcatattctcgaatccgcacagggtgtgattcttaaatgattgattaattgatatgatta

SEQ ID NO: 1916 - protein, 148 aa, Corynebacterium glutamicum
MTYFALVARNYAETGVSVEFHEVDDDADNSNGPNNTSNLPLKLLRDHSFDATVVYGDLVLHTSAHLRDTAIANSDNRPRVVTTAQKFFDYIRLATRHGAIHDMINNAPDTGTDIVVITATNDALISDESEYYDELFHILESAQGVILK

SEQ ID NO: 1917 - DNA, 822 bp, Corynebacterium glutamicum
  CDS (101)..(799): RXA00749
cgtttcgatcatttgtaacattcttattacaagactggaaataaaggtgagtcaatcatacagtcagatgtggtcatcggcaaaacagaaaggaatcccgatgttacgaaaaacagttaccggtggaattgttgctcttattgcgactgccactctcatgaattctgtctcttctgctgaagaggtatccggagatgtctcagcagtagatctcgcatttgcagaattcgaacgtacaactgcagaggacgtggccaatggagtgccagaggctatagctaatgcagaaaaaatttccaatttcactccgagcgaactagagggcttcaagagtcttttagctagtgatgcagtgctgaggtcggtctctggagaagaaattctcccagataatgttgaagtggttcagacggacaacgtaggcgacgaagatccaaatgtcatttctccagcagcctggcagggttctgattatattgaggggtgtttaacgaatactctctacggaattgaagtcctaaaggtttgtactggtggaacctactactccaatgtaggaatcgctacttctgtcagcaatcctcgcagttacgtaaagtataacagtgctccaggattggcagtgacgacaagcaatccacgtggaggtatagagggtggtcttgcggccttctatggtgatgttaaccttgttgcttttccaaatattccatgggtgggaccaattagttcttctgcaggaactcaccgcgttgtcgctagatcatttccgaattcagtggtgcttaacgtctactactaatcgttttttagtttgaaaca

SEQ ID NO: 1918 - protein, 233 aa, Corynebacterium glutamicum
MLRKTVTGGIVALIATATLMNSVSSAEEVSGDVSAVDLAFAEFERTTAEDVANGVPEAIANAEKISNFTPSELEGFKSLLASDAVLRSVSGEEILPDNVEVVQTDNVGDEDPNVISPAAWQGSDYIEGCLTNTLYGIEVLKVCTGGTYYSNVGIATSVSNPRSYVKYNSAPGLAVTTSNPRGGIEGGLAAFYGDVNLVAFPNIPWVGPISSSAGTHRVVARSFPNSVVLNVYY

SEQ ID NO: 1919 - DNA, 951 bp, Corynebacterium glutamicum
  CDS (101)..(928): RXA00751
cgcagcaaccccgtccatgagggcagggaacgccacacatcctgtacctatactgtgaggtggcatagagtatctctaatttagaaagtggtgtagaagtatgttggtacgttcacgcacgttggttaccgctgcactgtcatgttcactgttgttcggagcaacggtaaatggcacgggtgttgcgattgcatatgaaaatgtgtctatggctgctcagtatgaaccacggtatgaatccttagaaacgcgtctcggttctagtggagtctttcccaagtcggttgaacagtctgttgaaaaccttgctgaattaccagaggagactcgatttttacttgagggtgattcgttttcaattattattgatgatggtctgctcgcttctcgattggacccaaatacaggggagattcgacatactcttggggcttcggggatcagctacacccctggtgaaatgaaacgatcttatacagatcgagtgactgtcaaggtggtctaccctgatgggtcatttgatagagtgacaccccattcagtggtttatgtggctgacagtatttactacggcattgaaagcacgggttatcctaaagtccgcaatggtcagactgtcaagatcccattgagggtgacggatggtggtacaggagcggttggtggggtcccacagggatcgaaggtggtccgagatcgttacggctcaattgagaatgcggagttgatgggtgcaatcattctcatagatgagaagactggcgatctcaccttcacggcgcctgatgatcgaaccggtcaactgtggtttcgtacagaagtgactttcccggatggttcggactcagaggttcaatatgtgatcgaggtgacggatcagcctgaacctgtggatgtcattcgtcctgccggatcgtctctgagttcttgatttatgcctgagacttaagc

SEQ ID NO: 1920 - protein, 276 aa, Corynebacterium glutamicum
MLVRSRTLVTAALSCSLLFGATVNGTGVAIAYENVSMAAQYEPRYESLETRLGSSGVFPKSVEQSVENLAELPEETRFLLEGDSFSIIIDDGLLASRLDPNTGEIRHTLGASGISYTPGEMKRSYTDRVTVKVVYPDGSFDRVTPHSVVYVADSIYYGIESTGYPKVRNGQTVKIPLRVTDGGTGAVGGVPQGSKVVRDRYGSIENAELMGAIILIDEKTGDLTFTAPDDRTGQLWFRTEVTFPDGSDSEVQYVIEVTDQPEPVDVIRPAGSSLSS

SEQ ID NO: 1921 - DNA, 552 bp, Corynebacterium glutamicum
  CDS (101)..(529): RXA00752
aaggtcagccgtatttcggtcagtcagcaactaactacgcttatcttccgtgtacgatagaccgtagttaacataaggaatggaataggagaattgcggcatgtattccgacaagctgattctcttgttcctttctgagcaggattcaagctatgaatgctgcgtaggtttattagatggctcagatggacttgattatattgaaaagcttctgaagggtaggaagctgaagaaccattttcttgaatgggaagatattaacaaggctgatgttgctcgtgaagaaatatataaagggcaattggtgcatctggtgtttgtgacggctctttccacgcctggtgaaatttcttttgtttttccaggtcaatctcttatgagtgcaacactcgaagaagactttgctgcgcttgtgctcgaagaggagcgcacatcatttagacctgaactgtctcacctgtggtcactccccgtagggtgggtagctccggggcttgagggtttcgtggagcgtaattccgaggcagcttgaaccaccgctttctgagccgg

SEQ ID NO: 1922 - protein, 143 aa, Corynebacterium glutamicum
MYSDKLILLFLSEQDSSYECCVGLLDGSDGLDYIEKLLKGRKLKNHFLEWEDINKADVAREEIYKGQLVHLVFVTALSTPGEISFVFPGQSLMSATLEEDFAALVLEEERTSFRPELSHLWSLPVGWVAPGLEGFVERNSEAA

SEQ ID NO: 1923 - DNA, 1377 bp, Corynebacterium glutamicum
  CDS (101)..(1354): RXA00757
caggtttagcgaattcaatttctaccactgctcgaggggaatgtgctaattcaagggttgtgacctcgagcaactttttattccgctcgatcaaaacaacgtgagtttcggcgtcgttaagcgccccgatgcgtgctacgcgctttttgccatcctgatcaagcgcaaccaggcgaccgcggtttctgcgccaatggcgcggcagcgtcagtgggttgtccacgcccggcgtggacacttcgagcgtgtaacccgctccgaagttgagctctccgcgctgctcggcggcgtcgaaaagctctccgatttcttggctgaatacttccagctggtcgagatcggggcgggaatccgaatctaccttgatggcgacggcggattttggacctgctttggtcactttcaggccctcgaggtcgaatttgtgggatgcggcgagcggctcgatgagcgcagacagaatttcagtggttggaaaagccataaagacaaggataacctgccggcaaaaatcatcgggctattacactgtgaagccatgcgtaggcgtatcccctctgtccttggtgtttctcttctggctgcctttttggtggcgtgcaccccctcccccaatccgaatgcggcgttggcccagatgtatcaggatgcgctttttgattcccaggcgatgtcagaggccgagcctgagcttgccactttgcgcagtcagcacgcagatgaattattggccgagattcggcgtatttgtggctttgatgaaggccaggttccggaatcgtgccaggtaacggttcctgcgatcgctattctgcccaccgatgatccagagaagtatgtcaacgacagtcaggcgttgatccttgataatttggatgacattccggaagattccgtggctttagtggttgagcaatacatcgcgcaggcggaatttgctgaaggatctgaggtgtccgttcctgttgatttggagctcaccgaggcagaattagctgctgcgaaggacttggcggaccgcgagttttccgccgcgtggtctttgggcgtggctttggctcagcttccggaaaccgaccgcgaggaggtggaaacggcgatcagcaaccaccatgaccgcgcgtcgcagctgcaaattattacctccggcactaccccagcgccaggttacgtgagcgagctgcccgaccccaccgacgagacttcagcgcgaagcaacattgaaaccgtcgaaaacaacgtcacccaggcctggcatgcagctgcaagcgccgcaaccaccgacgcctggcgtgtcttctgcgcgcacatcgccggcgataccgcacgcgaattaacgcttatcgacgtctcctagcagtttcactgccaattttt

SEQ ID NO: 1924 - protein, 418 aa, Corynebacterium glutamicum
VSFGVVKRPDACYALFAILIKRNQATAVSAPMARQRQWVVHARRGHFERVTRSEVELSALLGGVEKLSDFLAEYFQLVEIGAGIRIYLDGDGGFWTCFGHFQALEVEFVGCGERLDERRQNFSGWKSHKDKDNLPAKIIGLLHCEAMRRRIPSVLGVSLLAAFLVACTPSPNPNAALAQMYQDALFDSQAMSEAEPELATLRSQHADELLAEIRRICGFDEGQVPESCQVTVPAIAILPTDDPEKYVNDSQALILDNLDDIPEDSVALVVEQYIAQAEFAEGSEVSVPVDLELTEAELAAAKDLADREFSAAWSLGVALAQLPETDREEVETAISNHHDRASQLQIITSGTTPAPGYVSELPDPTDETSARSNIETVENNVTQAWHAAASAATTDAWRVFCAHIAGDTARELTLIDVS

SEQ ID NO: 1925 - DNA, 906 bp, Corynebacterium glutamicum
  CDS (101)..(883): RXA00763
agcgcgatttgagtgcttttaatacgatcggaagtattcatgtccccaggttagccccaagtttgaatctcttgcaggaacgtggggtaaagatatagatgtggaaaaatccagaaaacgacttgtgaccatcgcagcatcgacaattggggccgttgcggtggctggcggcgctttttggatcgttgatgcttccatcgctgcgcacgcggaacgcaacttgtctaaagcagttgcggaatccgcagatcttgaaaacgacccgcgagtattcctcggcagctccatttactccacggcgttttttaccggcaaactcgactccgtaagcatcgacatgctggacgtggaaatccccggcgtcggcatggtgaatgcacgcacagaggtagaaagcgtggaagtctcacgggatcaaatcctctccggtgacctcgacggcaccactgcggaaaccttcacgcgcacattacgcatggacggcgtcgcaatcggcgcgcagctcggaatcaccgacctcgacatctcccaccccatcgacatctccccctccggcggcatcacctcagaagcgctcctgacaggaaccccaccagacatggaagacccggtcagtgtgctggtcacccttcgcctagtcggctcagaattccagatgctgccgtacgagcttatcgacgcaccctccggactcaccctcgacgatgtcgcccccgacttcacgtggaaaatcgacaccctgcaactacccctcgcagatcgggcaatggcggtttacctatctggtggctccgtccatttccaatctgaagcccgcaacgtccagctcaccacccgcgaactatcaccactagctgcaccggaagaaaactccgatgaatcctagatgccaaacgtgcgcacccg

SEQ ID NO: 1926 - protein, 261 aa, Corynebacterium glutamicum
VEKSRKRLVTIAASTIGAVAVAGGAFWIVDASIAAHAERNLSKAVAESADLENDPRVFLGSSIYSTAFFTGKLDSVSIDMLDVEIPGVGMVNARTEVESVEVSRDQILSGDLDGTTAETFTRTLRMDGVAIGAQLGITDLDISHPIDISPSGGITSEALLTGTPPDMEDPVSVLVTLRLVGSEFQMLPYELIDAPSGLTLDDVAPDFTWKIDTLQLPLADRAMAVYLSGGSVHFQSEARNVQLTTRELSPLAAPEENSDES

SEQ ID NO: 1927 - DNA, 810 bp, Corynebacterium glutamicum
  CDS (101)..(787): RXA00765
acggaaaagtttctgcgtctgcgtggtcgactcaggattcgcaatcagaagaacatgcacgttatctaagagtagtgccaaaacgctagtcttgagtgtcatgagcgaaaattccacccctaataatccagtcgtcccaggtgcaggcgcagacggcccatcactgtccgattctgcaagcatcagcggatccgacgcagtaaacctcgctgccgaacaatccaagagcaccgctcaccgcaacatcccaggcctaggtgaccttcctatccctgacgacaccgctaacctccgcgaaggccccaacctccacgacggactcctcgcgctcctccctctcgtcggcgtctggcgcggcgaaggccaagccgacaccgcagaagacggacaatacgcattcggccagcaaatcaccttcgcccacgacggtgaaaactacctctccttcgaatcccgcatgtggaaactcgacgaagaaggaaaccccaccggcgtcgaccagcgcgaatccggcttctggcgcatcaatctcaaagatgaaatcgaattcgtctgcacccacgccggcggagttgtagaaatctactacggccagccactcaatgagcgcgcctggcagcttgaatccgcatctaccatggtcaccgccaccggcccatccacccttggaccaggaaagcgtctctacggactgcttccaaccaacgaactcggctgggttgatgagcgtctcgttggcgacgccctcaagccacgcatgtccgcacagctcacccgcgtgatcggctagttttttctagttcaccgtca

SEQ ID NO: 1928 - protein, 229 aa, Corynebacterium glutamicum
MSENSTPNNPVVPGAGADGPSLSDSASISGSDAVNLAAEQSKSTAHRNIPGLGDLPIPDDTANLREGPNLHDGLLALLPLVGVWRGEGQADTAEDGQYAFGQQITFAHDGENYLSFESRMWKLDEEGNPTGVDQRESGFWRINLKDEIEFVCTHAGGVVEIYYGQPLNERAWQLESASTMVTATGPSTLGPGKRLYGLLPTNELGWVDERLVGDALKPRMSAQLTRVIG

SEQ ID NO: 1929 - DNA, 411 bp, Corynebacterium glutamicum
  CDS (101)..(388): RXA00781
tttcttaggaaataaaacagggtgtctttgtgttcaaaaggtataaaggaagagtagttccggttaattccaccgggatgagataccgaggagaacgcacatgagcgagaacaaaaacattgagattgtccacaatgaaggacagaagcgctttgttatcagcgttgatggaacgccagctggatttgccagctatttagacggcccggatatccgcaacttcaaccacactgttattaagcctgaattccgtggacagggactgtctgcgccattgatcaagtttgctttggatgatgcacgtgagtccggtatccgtattcatgatgcttgctctgcagtcgctggcttcattcagaagaaccctgagtataaggatctaaagaactagctggcacaggggggtggttc

SEQ ID NO: 1930 - protein, 96 aa, Corynebacterium glutamicum
MSENKNIEIVHNEGQKRFVISVDGTPAGFASYLDGPDIRNFNHTVIKPEFRGQGLSAPLIKFALDDARESGIRIHDACSAVAGFIQKNPEYKDLKN

SEQ ID NO: 1931 - DNA, 348 bp, Corynebacterium glutamicum
  CDS (101)..(325): RXA00788
cgcatccctctagttttccatcacctcaatgaacggcgctaactccggttcattgcgcaattgatccagcactgcttgcagtgaggcctcattagttggcatggcctcctccatcaacatcggagtgttcaaccttggaaatgctgttgctgcctggcttgctggtgcaaccatcaccacttcccttggactcacatcagccggattagttggcggtttgatgacgtccctcggactagtgttggccatcgtggctgtggttttgcgtcgaaaagcgcaaggcacccaagcgaccatcagcgttgtggagcaccagcccgcccaataaataatttctctcttctaatt

SEQ ID NO: 1932 - protein, 75 aa, Corynebacterium glutamicum
MASSINIGVFNLGNAVAAWLAGATITTSLGLTSAGLVGGLMTSLGLVLAIVAVVLRRKAQGTQATISVVEHQPAQ

SEQ ID NO: 1933 - DNA, 567 bp, Corynebacterium glutamicum
  CDS (101)..(544): RXA00804
aatctagtgcaagttccagcgaaaaccttccaaaactgaccaagtttaagaagattcgctaccctatgaatcagttgtaggagtaagaggggagttagagatgaagatcagaagtgcacgtgaaatcgcggagtggttcgttgcctggggagatgaactcgatgctgaagtctcccctttgaaattgcagaagctcctttattactcccagggtgagcatatagctgcaacagggcgaaaacttttctcggataagattctggcgtggcagcacggacctgtcactccgggcgtttattcagatacaaaatcatacggccgaaacccaattgatcctgatgagtttgtgtcagatgaatttaactgggatgactactcagatgtgtcagatgagcttgtaaccgtatggcgaaaatacggcatctattcggcgtgggcactgagggaaaaaactcacagtgaatcgccgtggctcgatgcctgggcacaagggcaaaatattgaaattacagatgctgcgctgaaagatttcttcttggtgcattagaaatttgaaaaagaaacgaa

SEQ ID NO: 1934 - protein, 148 aa, Corynebacterium glutamicum
MKIRSAREIAEWFVAWGDELDAEVSPLKLQKLLYYSQGEHIAATGRKLFSDKILAWQHGPVTPGVYSDTKSYGRNPIDPDEFVSDEFNWDDYSDVSDELVTVWRKYGIYSAWALREKTHSESPWLDAWAQGQNIEITDAALKDFFLVH

SEQ ID NO: 1935 - DNA, 1005 bp, Corynebacterium glutamicum
  CDS (101)..(982): RXA00805
tgctccgctgacagtggtgcgcctgagcagcccaaaagagacaaagcgctggttgagggcatatggggaaagcgtgaaactctgatagggtgccatatccatggcagaaagttttatagaggtctcggcggggcatgcggatcggcggatagataagtttttgcgggcacagctaaagggcgtgcccgcgtcgttgattttccgtcaaatgcgtaaaggcgacattcgggtgaatggtcgtaaagtggatccgaattaccggttgcaagaaggcgaccgaattcgaatgtggcagatggatttgctggcagatttgccgccaccggtcgtcgataagcatatttttaaggctgtcgcagacagcgtgctttttgaggacgccgaattactggtgatcaataagccagctggaattcctgtgcacggtggcacggggcacggcggtggcgtgattgaggcgctgcggcagaagtttccgcaggaacgcgacctggaattggtgcatcgtttggatcgggacacctcaggtttgttgctggtttctaaaacgacatctgtgttgcgcgagttgcaggaaattttgcgagaccgcgaagaggagatttttcgggggtatttactcaaggtcgagggggcttggcctggcgatttgcgacaaattgatgtgccgttgaagcggacggagacaactgttgtgccacattcggatggtttgcgggcgcggacgtattttgaggttgtaaagcgtttgccgggtgcgaccttggtgaaggcgcagttggcgaccgggcggaaacatcagattcgggtccatgcgcagtatgcgggtcaccctattgttggcgatccacgatacgggtcgcgtgggggcagagctgcgacgatgcatttgcatgcggcggaattggtggcgcctcgtggggcggggaagcgtcagaaattcactgcaccgttgccgaaggagtggggtatgggacgggtctgagtcgggccttcgtggaatcg

SEQ ID NO: 1936 - protein, 294 aa, Corynebacterium glutamicum
MAESFIEVSAGHADRRIDKFLRAQLKGVPASLIFRQMRKGDIRVNGRKVDPNYRLQEGDRIRMWQMDLLADLPPPVVDKHIFKAVADSVLFEDAELLVINKPAGIPVHGGTGHGGGVIEALRQKFPQERDLELVHRLDRDTSGLLLVSKTTSVLRELQEILRDREEEIFRGYLLKVEGAWPGDLRQIDVPLKRTETTVVPHSDGLRARTYFEVVKRLPGATLVKAQLATGRKHQIRVHAQYAGHPIVGDPRYGSRGGRAATMHLHAAELVAPRGAGKRQKFTAPLPKEWGMGRV

SEQ ID NO: 1937 - DNA, 701 bp, Corynebacterium glutamicum
  CDS (1)..(678): RXA00808
gctggcttcaatgagatgatgcgtggcctgcgtgaacgtcagcgcgtccgtgaccttttcggtcgctacgtgggcgctgaagtggccaagcgtgcgctggaggaacgccccactctgggtggcgaggaccgtaaggttgccgtgttgtttgtcgatgtcatcggctccactacctttgccgtcaaccacactcctgaagaggttgtggaggcgctcaatgagttcttcgagcacgtcgtggaggttgtgcaccgcaacaagggtgttatcaacaagttccagggtgacgcggcgttggcgattttcggcgctcccctgcccctgtctgatgccaccggtcatgcgcttgcggctgcccgtgagctccgcgcagagctgaaagatctccagctcaaggccggaattggtgtggctgctggccatgtcgttgctggtcatatcggcggtcacgcgaggtttgagtacactgtgatcggcgacgcggtgaaccaggctgcgcgcctgacggagatcgcgaaaacgaccccaggccgcaccgtcaccaacgcttccacgctgcgtgaggccaacgaggcggagcaggctcgctggacgctcatgaagtccgtggagctgcgcggacgtagccagatgacgcagattgcgcggcctattcggccgacgttggcggataggtcctaatacgcttttcgacgcaaaaa

SEQ ID NO: 1938 - protein, 226 aa, Corynebacterium glutamicum
AGFNEMMRGLRERQRVRDLFGRYVGAEVAKRALEERPTLGGEDRKVAVLFVDVIGSTTFAVNHTPEEVVEALNEFFEHVVEVVHRNKGVINKFQGDAALAIFGAPLPLSDATGHALAAARELRAELKDLQLKAGIGVAAGHVVAGHIGGHARFEYTVIGDAVNQAARLTEIAKTTPGRTVTNASTLREANEAEQARWTLMKSVELRGRSQMTQIARPIRPTLADRS

SEQ ID NO: 1939 - DNA, 1182 bp, Corynebacterium glutamicum
  CDS (101)..(1159): RXA00812
ttcacaggtgagcgtatcgcgggcggttgagaggtgagttatccacaggccgcagagggggtcgttgaaagcacgtaagcctcaggccacagtaggtgccatgaacaccatcacacaccaagcaattctcatcgcagtggaagatccggtcctgcacccagaggccatgcacgtagctgcagccactggtcggccggttattgaaacaacaaatttgatggacatctccaggcattttcaccgcacatcggcagtgctcattgatgcgtcgatggcctctcaattatcacctgggaaacgccgcgacagggtgtttcttctcgattctgatccagggccctctgattggaaaacggcgatgaaaatccacgctgagcaagccatgttgcttcccgctcaggcaggggagttgctcagcgctttaggcagagatgacaaacaactgccggtggcttcgggccatgtcatcggtgttgccggggtggtgggaggaacaggcgcgagcacgtttgctgcggcgctcgcaaagcggcgtgcggagtcagtcaccactgtgcttatcgacgccgacccttcctctggcggcatcgacctgttgctaggaatcgaagatgtgcccggcgcgcggtggcctgatgtggggttgcgtcgcggaactgtccaggctgctgatgtgttgaaagcgctgccgagcactcctgatgaggtcgtggtgttgtctacggcgcggtctaatattctggatccttttgcattatccgagtctgatgtttcagcggcgattgattgtttcttaagcgccgataggtcggtggatgtggtggtggatctgcctcatgcgagagtgcatccagatattgcggagcgcttatcccacctggtgttagtcatccctgcagaggtccgagcggtggctgctgccagggctcggtgtctggaattacaacaattgcatgtatccatcacgtgcgtgttgaggcatcgcgggtggtcaggtttggatgttgcagaagtggaagagattttaggtgcggatattaccgcggaggttggctcgatccagcggctggctaagtccgtggagatgcatgggctgaccggttctttgccgagggttttaagctcagcatgcgacgcggtcctcggggaggtggcggcatgactgacattgatctggtggtg

SEQ ID NO: 1940 - protein, 353 aa, Corynebacterium glutamicum
MNTITHQAILIAVEDPVLHPEAMHVAAATGRPVIETTNLMDISRHFHRTSAVLIDASMASQLSPGKRRDRVFLLDSDPGPSDWKTAMKIHAEQAMLLPAQAGELLSALGRDDKQLPVASGHVIGVAGVVGGTGASTFAAALAKRRAESVTTVLIDADPSSGGIDLLLGIEDVPGARWPDVGLRRGTVQAADVLKALPSTPDEVVVLSTARSNILDPFALSESDVSAAIDCFLSADRSVDVVVDLPHARVHPDIAERLSHLVLVIPAEVRAVAAARARCLELQQLHVSITCVLRHRGWSGLDVAEVEEILGADITAEVGSIQRLAKSVEMHGLTGSLPRVLSSACDAVLGEVAA

SEQ ID NO: 1941 - DNA, 897 bp, Corynebacterium glutamicum
  CDS (101)..(874): RXA00814
gccgcaggctagctcaactcggggtgctccgcggaaatcctgtgaccacgcaggtggtgtgggatttggaccacggcatgcacgaagggagcgaagaggcatggtttatgccctaggccttcttagcgtggcggtgttgatctctggttcaaggggccccggcgcgcgtaccaggccaccaacacctgggaatggcgtccatctattcgccctaattgcactattttgcctggccacagtgctatttatcgtcgttgacgcctacacgatgatcgccggcatcatcatcgccacaactctattctggtatctccgccagacacacgccgcagcccaacgcaccaaacaatccctccaattagccagcttcttaagcctctgcgcaggcaatttacgcgccggggtcaccatggtcgacgccatggactacgcgctcgacaacaccacgccggacaaattcttaagccccacgttgcagaccgcagccaggcaggcgcgctcgggcggcagcgggccgcgagtgcttatcgacgcctccctccccgatcttcaacgcctcggccatttgtgggaaacatcagaacgacacggcatcccgctggtcgccctcattgatcaaatgaggtcccggatttcatcgaagcaacgccacggcgaatccacccgagctgcactccaaggaccgcaagcaaccgcagtgatccttaccgtgttgccactagcaggaatgctcatgggcacagccatgggagcaaacccccttgggctactcaccggtggtgggatcggtgggttcctgcttgtcatcggtgtgggcctcgatgctgcagggtttgtgctcacccacaaaattctccagagcgcgagcccctcatgattacagcactagttcttgca

SEQ ID NO: 1942 - protein, 258 aa, Corynebacterium glutamicum
MVYALGLLSVAVLISGSRGPGARTRPPTPGNGVHLFALIALFCLATVLFIVVDAYTMIAGIIIATTLFWYLRQTHAAAQRTKQSLQLASFLSLCAGNLRAGVTMVDAMDYALDNTTPDKFLSPTLQTAARQARSGGSGPRVLIDASLPDLQRLGHLWETSERHGIPLVALIDQMRSRISSKQRHGESTRAALQGPQATAVILTVLPLAGMLMGTAMGANPLGLLTGGGIGGFLLVIGVGLDAAGFVLTHKILQSASPS

SEQ ID NO: 1943 - DNA, 696 bp, Corynebacterium glutamicum
  CDS (101)..(673): RXA00815
ccggtggtgggatcggtgggttcctgcttgtcatcggtgtgggcctcgatgctgcagggtttgtgctcacccacaaaattctccagagcgcgagcccctcatgattacagcactagttcttgcagcagtggccatgttcctcggttcacccaaccctggagttcgcggtggattgataagccccaaatccggtaaaagcctgcgtatccgagctggcccaaaaaagctgggcaacgctgacccagtggatgtctctgcagatatcgaactgttttcagcgtgtttggatgcgggtttaaacacacgtgatgcagcgcaggtggtggctcatgttgcagccattacgcaccgcgaactgtggacacatgtggtggcattgctatcgattggagtgagtgcccctcaagcattcgccctgatggcaggagttgatgggctggatgaactagccaatttagccaccgtgtcgcacaggtcgggcagtgcattaagtgatgggtgcaggaacatttccacctcgttgttggcctctgctggtgacaagcgcaccgccgcagcagaacgcgcaggagtgttcatcgccctgccacttgctctgtgtttcctccccgcattcatgattgtcgggcttgcaccagtggtgctcagcttgggtacgcaacttatcaatttctagaaaacacacacaggagaaaa

SEQ ID NO: 1944 - protein, 191 aa, Corynebacterium glutamicum
MITALVLAAVAMFLGSPNPGVRGGLISPKSGKSLRIRAGPKKLGNADPVDVSADIELFSACLDAGLNTRDAAQVVAHVAAITHRELWTHVVALLSIGVSAPQAFALMAGVDGLDELANLATVSHRSGSALSDGCRNISTSLLASAGDKRTAAAERAGVFIALPLALCFLPAFMIVGLAPVVLSLGTQLINF

SEQ ID NO: 1945 - DNA, 420 bp, Corynebacterium glutamicum
  CDS (101)..(397): RXA00816
atgctcaccgcaacagccactatcccggcaccgattgggcaggtgagcgcgagtgcggtgttcccggtggaaaactagctgtgcaaatgacgaaggctacatgaccatcgccagcgctggtgtcgcctccatcctcattagcctgctggtggtgctggcctggcaggcgggaaacctcgtggccagggaacaagcacaggtagcggccgatgtttcagctgttgccggagcctacgcctttgcccgcggggaactacccgacgctgcctgcgccaccgcgaaacacacagccgaagcaaacaacgcacaactagaaaactgcgcaacagaaggggaggatctcacgctcaccgtcaccgttcgtggacaagaagcccacgcaaaagcaggacctttatgaggttcccaacaaggtcacca

SEQ ID NO: 1946 - protein, 99 aa, Corynebacterium glutamicum
MTIASAGVASILISLLVVLAWQAGNLVAREQAQVAADVSAVAGAYAFARGELPDAACATAKHTAEANNAQLENCATEGEDLTLTVTVRGQEAHAKAGPL

SEQ ID NO: 1947 - DNA, 654 bp, Corynebacterium glutamicum
  CDS (101)..(631): RXA00826
tcggcgcgcgcgatctggtgctcatcttggtgtgtgctgccatttccgcgatcgctctaaccgtgtccattcagactggtttctttaagttcttgggcacatgatcacagttttaattgatggacaatccggtgcgggcaaaaccaccttggcgggtgagttagctgcccgcaccgggtttcagttggttcatttggatgacttttatcctggttggactggccttgaagcggcatcggagattgttgcacgccatgttttggacgcggacaaccccggtttcttcacgtgggattggcacaacaattgccaaggcgattggatcaagttggagcctggtcgaagtctcattatcgaaggctctggatcaatcactgctgcaacaaaacgcaaggcatcgctgttgggcgagctggtgaccgttcgtatcactggtcctgaggctttaagaaaacagcgcgccctcaaccgcgatcctgattacgcaccattttggaaagtgtgggcgcagcaggagcaacgccatttctctttaggcgttgaggtggatcatgagattgtgctaggttctgatgaggcttcgggacgacccgaagaaatctatgacagcctgggaacggcccagagttcttaagaaagtttgactagagaaca

SEQ ID NO: 1948 - protein, 177 aa, Corynebacterium glutamicum
MITVLIDGQSGAGKTTLAGELAARTGFQLVHLDDFYPGWTGLEAASEIVARHVLDADNPGFFTWDWHNNCQGDWIKLEPGRSLIIEGSGSITAATKRKASLLGELVTVRITGPEALRKQRALNRDPDYAPFWKVWAQQEQRHFSLGVEVDHEIVLGSDEASGRPEEIYDSLGTAQSS

SEQ ID NO: 1949 - DNA, 846 bp, Corynebacterium glutamicum
  CDS (101)..(823): RXA00830
tgatggtggctcgattgtattcgagggcagccccgcggaactcatcaaaactgatactccaacaggacgccaccttaaagcttatgtagattagtttcttatggaaaaccctggtgatctcggcgctatgccacagtacggttttgagcatatttcgatgctcatcaccgctgtggttttagcgattcttgtcgtccccattgctcgtcgattcaacttcgcaccggcatttggctgggtgctactcatcgcaacacttctgtcgaacctgtggaattttatgcccggctattacacgctggaccaatcttggccattccacttctcagatgcattgcgcattattgctgccatcgcattgattaatcgcgcgcggtgggcagtttcagtgactattttgtggggcaccacgatcaacctgatgtcactgctcactccagatgttcagtatttacaggttccctggctggagtttttaatgtactggtttatgcacatttctgtgttcctagcagctataattctcattttcgcttttggagaaaagccagggctgtccggagtggttatgtccgttgcagtggcgattagctggggcatcatgtgcctcatggtcaacgcatttttgggaaccaactacgggtacctctccacagaaccagaatcagcgtcaattctggatttgttgggaggatggccgttctacatcgtcgcggaagtattactcctgtgtgcagtgtgggctttgtggtcttatctgattgataagctgcctatcacgtatcgccctgcttaccgtccgaaaactcggaaggccgctgcgtaaccgccctctacctcgagaaa

SEQ ID NO: 1950 - protein, 241 aa, Corynebacterium glutamicum
MENPGDLGAMPQYGFEHISMLITAVVLAILVVPIARRFNFAPAFGWVLLIATLLSNLWNFMPGYYTLDQSWPFHFSDALRIIAAIALINRARWAVSVTILWGTTINLMSLLTPDVQYLQVPWLEFLMYWFMHISVFLAAIILIFAFGEKPGLSGVVMSVAVAISWGIMCLMVNAFLGTNYGYLSTEPESASILDLLGGWPFYIVAEVLLLCAVWALWSYLIDKLPITYRPAYRPKTRKAAA

SEQ ID NO: 1951 - DNA, 726 bp, Corynebacterium glutamicum
  CDS (101)..(703): RXA00853
ttggatccagttgagaaatttcagcccccatcccccacatgaacgctgttcaaaacatccagcttgcttgttgaacactgttcaggtgtatgattttttcatgcctacatcctcttctcctgcaactgtgactccgctaaagaagcagtcttcacgtaaacagctccaagacatcgcgcttattgcagtttttgcagcactgatcattgtgcttgcttttgtttccatcccagttggcacagcgggagtgcctattgttttgcagaatgcctccatcgttttggctggcctgattcttggtggtcgacgtggttttctcactgctttgctgttcctggcactcggcctgattggcctgcctgtccttgcaggtggtcgtaccactttggccgcacttgctggcccaacagctggctacatcgtgggttacctcatttccccacttgttgcaggcatcatcgcttacctcgcacctaaaaagcgtggcgctggaatgttcatcgttttaggcctggcgggtctcgcgggtctgatcacccaatacgcttgcggcatcgtgggtctcgtccttcgtgcgggtctaagcttgagtgaagcaacaattgctcaaggtgcctttgtgctgccagatttggccaagatcaccgtcatggtcataatcgccgctggagttcatgcagcattccctgacatccgtaagaaatagttccaacccacttttcctca

SEQ ID NO: 1952 - protein, 201 aa, Corynebacterium glutamicum
MPTSSSPATVTPLKKQSSRKQLQDIALIAVFAALIIVLAFVSIPVGTAGVPIVLQNASIVLAGLILGGRRGFLTALLFLALGLIGLPVLAGGRTTLAALAGPTAGYIVGYLISPLVAGIIAYLAPKKRGAGMFIVLGLAGLAGLITQYACGIVGLVLRAGLSLSEATIAQGAFVLPDLAKITVMVIIAAGVHAAFPDIRKK

SEQ ID NO: 1953 - DNA, 426 bp, Corynebacterium glutamicum
  CDS (1)..(426): RXA00861
atggctcctcacaaggtcatgctgattaccactggtactcagggtgagcctatggctgcgctgtctcgcatggcgcgtcgtgagcaccgacagatcactgtccgtgatggagacttgattatcctttcttcctccctggttccaggtaacgaagaagcagtgttcggtgtcatcaacatgctggctcagatcggtgcaactgttgttaccggtcgcgacgccaaggtgcacacctcgggccacggctactccggagagctgttgttcttgtacaacgccgctcgtccgaagaacgctatgcctgtccacggcgagtggcgccacctgcgcgccaacaaggaactggctatctccactggtgttaaccgcgacaacgttgtgcttgcacaaaacggtgttgtggttgatatggtcaacggtcgcgca

SEQ ID NO: 1954 - protein, 142 aa, Corynebacterium glutamicum
MAPHKVMLITTGTQGEPMAALSRMARREHRQITVRDGDLIILSSSLVPGNEEAVFGVINMLAQIGATVVTGRDAKVHTSGHGYSGELLFLYNAARPKNAMPVHGEWRHLRANKELAISTGVNRDNVVLAQNGVVVDMVNGRA

SEQ ID NO: 1955 - DNA, 680 bp, Corynebacterium glutamicum
  CDS (101)..(664): RXA00862
aggtagttccttggcgcttgtggtttccgcctctttacttttaagtgcttgtgatggaagcggctcaacgcctacaacctctgctagtcctgctccagttgtgacagaaactgaaaccgctaacccggtcaccacaactcgcacgccttcagatgctgccccgtcgcctaccacttcagagcccactggttcagagtccaccaactccccttcccccactgctttgccgccgttgggttccccgtcgatggatcagaagcagcaggctcaagttggtgactccgatatgtcgatcgctggcatccgcgttgccgagcacgaaacgttcacacgagttgtttttgatatcgccggtaatggccaacctggttggtgggtcgattgggccactgatccaattcagcaggcgtcaggtcttccagttgagatggctggtgattccttcctcaacgtcaatattcaaggcactggatatcctgatcaggttgtcgttccaggtatcgataccggatcatatcctggtgcaggcattgttgaagacatcaacttcaccagtatttttgaagcccgttcccaagttctcattggtgtatctggtcaaccccgaaattactcggtctcattgctgcaggaaccaaccaggcttgtggtggacatcgttcactagcgctggaacgccg

SEQ ID NO: 1956 - protein, 188 aa, Corynebacterium glutamicum
VTETETANPVTTTRTPSDAAPSPTTSEPTGSESTNSPSPTALPPLGSPSMDQKQQAQVGDSDMSIAGIRVAEHETFTRVVFDIAGNGQPGWWVDWATDPIQQASGLPVEMAGDSFLNVNIQGTGYPDQVVVPGIDTGSYPGAGIVEDINFTSIFEARSQVLIGVSGQPRNYSVSLLQEPTRLVVDIVH

SEQ ID NO: 1957 - DNA, 1212 bp, Corynebacterium glutamicum
  CDS (101)..(1189): RXA00874
agctgttccctaccattgctgaacgggagtggattgtcactttagcccctcacggattcttctggtttgatctcaccgccgatgaaaaggacgatatggaatgagcattggccaacacatcatcaccgagcgtttctacggcgccaagtcccacaccatcgacaacgtagatattgtgttgtcccgcgaatgtggcgagaacactttggctgtagtgcgcatcaacaatgcgctgtatcagttgttggtcaatgatgatggcaaagatgttctcaacgaccacgtagaagaggtcggtgcgagtttcggagcatggactggcagctctgcttttcccattggccctttcactccactcggcacagaacaatccaatagctctttcatcaccgccgacaataaagcgatcgtgaaatacttccgcaaattagaatccgggcaaaaccccgatgtggagctaatttctaaaatttcctcctgccccaacatcgcgcccatcctgggtttttcctccgctgagatctccggggctaactacaccctggtcatggcgcagcagtacgttccaggtttggatggctggtcacacgcgctgactactacctctggcagctttgcagaggatgcagaaaagatcggcgaagccacccgcaatgttcacactgctcttgcatcggccttccctactcgggtagttcccgtagaagcactcgccgatgcgctcactacccgccttaatgaactaatctcccaagcacccgaaatcgcccgcttcaaagaagcagccatcgacctctaccaatcgttggaaggcgaagcccacatccaacgcatccacggtgacctccacttggggcagctcatcaaaacccccgaacgctacatcctcatcgatttcgaaggcgaacctgcccgcccacttaatcaacgacgcctccccgactctcccctgaaagatctcgccggcatcatcagatccatcgactacgcagcctacttcgacggcgaacacacccaatgggccaacgaagccaccgcgctattcctcgacggctacggatcaattgaagaccaagaactcctcaatgcctacattctggacaaggcgttgtacgaggttgcctatgaaataaacaaccgccccgactgggtgaaaatcccactcgaggcggtcgaaaggcttctagactagttagttactctgcgtcaaac

SEQ ID NO: 1958 - protein, 363 aa, Corynebacterium glutamicum
MSIGQHIITERFYGAKSHTIDNVDIVLSRECGENTLAVVRINNALYQLLVNDDGKDVLNDHVEEVGASFGAWTGSSAFPIGPFTPLGTEQSNSSFITADNKAIVKYFRKLESGQNPDVELISKISSCPNIAPILGFSSAEISGANYTLVMAQQYVPGLDGWSHALTTTSGSFAEDAEKIGEATRNVHTALASAFPTRVVPVEALADALTTRLNELISQAPEIARFKEAAIDLYQSLEGEAHIQRIHGDLHLGQLIKTPERYILIDFEGEPARPLNQRRLPDSPLKDLAGIIRSIDYAAYFDGEHTQWANEATALFLDGYGSIEDQELLNAYILDKALYEVAYEINNRPDWVKIPLEAVERLLD

SEQ ID NO: 1959 - DNA, 1878 bp, Corynebacterium glutamicum
  CDS (101)..(1855): RXA00876
ttgactatctcgaattaggtgagggctgggagccagaaattttgtgctctgatgctgttgaaattttagaaaatctcatcaaggaactaaggggaattccatgacattgaaaattgatccctcgtccatcagtagtgctgtgtctcgcttgaatgagcttcagcatcaagctattactgcatctcaagtgggaatgaaatcaacaattctatccgcgttttcgcccgtctctggactcgatcaattgggttccggtcacgggaatgtgattaatggtggggcaggcgcagcaaactctgtgctgaattcctatgccgaacaaatcgagtggttgtctgcggctttgcaggcttctggtgcggctttgactggccaggatgaattattcgctaggggtatggatgtagcggataccggtggcagggttgtagaagagtcagtaatgttcccggcgcggccggcacctcggtttgagtctttcgtttttaatccaccagctgttagtccttcgttgtcgttggatgcgttgtgtagtcagttttccggaaccaactcgggggcggttttggaggcgcaggggtcttggggctctatggcgtcggctattagcaatgtgtcggcttcgttgtcgtcgattgctggtgagattttggcggagaactcaggcgaaacgtttgagcaggctgctgctcggattaatgaggtggcggctgcgggggcgacgtttgctgcgaatgcgaaaatgatgggggcgtcggtggggacgctgaatcggatttatatggggcatcgcatgcaggtgtttatggctgcgacgtcgattaaggcgattttggatccggtgcagaggcttgctgcggagagggcgtttttggcgtcgtttcaggctacttttcaggcggatgtgttgacgggtatgcctcctgtgagcaatttgatgcagatgaagggggcgaatggttctgcgggggaaattgctctggggatggatgagattgctggcagtgggcaggcatggtctgcggcggggttgactccgtcgggggctgcgcagggtggtgtcgccaatgcgggcagtatcgcgccggatgcagcggttcaaggtgctgcggggcagagtggggttggaagttttggcactgtcactgatcagttggatggcatcaatattggggatatgttgacctctgctgcctcagctgggcagagccttgcgaatggtttggcgatgcctacttctacgcctaattcggcgtccggtgcgattccttcctcgatgtctgcggcatcgccgcttggtgcgtttggcagcggtgcagggttgggcgcacagggtggctcgattggatcttcggcacctggagcgatcagtagtcgagcggccggatccgcaggtggttcggtaccgggaatgactggtggtcctggcgcgccggggattacctcggattcgttgatgggagctcgaactcatggtgcttcttccgcgggagctgtcgctccgatgatgggtggtgctggcggaatgtctggtggcgtcgttggtgcaggtggtactggttctcagagcaagtatgcgcgccagactggatcgtcggttggatctagttcgcagtcgggttctggcctggggatggtgggatcagggagtgggaagccgtcgataagcaattttgggcgcggcatgatgccgatgatgcccatgatgcccatgggaggcgccggcggtgggcagaagaataccggcaaggtgaaaacggtgacgtctgcggtggaggaagaccgcaatttggcggcgctgctgggtgatcgggggccggttgttccgggtgtgattggtgactgggtgaggggctaacgcaacaatgtgtctaagct

SEQ ID NO: 1960 - protein, 585 aa, Corynebacterium glutamicum
MTLKIDPSSISSAVSRLNELQHQAITASQVGMKSTILSAFSPVSGLDQLGSGHGNVINGGAGAANSVLNSYAEQIEWLSAALQASGAALTGQDELFARGMDVADTGGRVVEESVMFPARPAPRFESFVFNPPAVSPSLSLDALCSQFSGTNSGAVLEAQGSWGSMASAISNVSASLSSIAGEILAENSGETFEQAAARINEVAAAGATFAANAKMMGASVGTLNRIYMGHRMQVFMAATSIKAILDPVQRLAAERAFLASFQATFQADVLTGMPPVSNLMQMKGANGSAGEIALGMDEIAGSGQAWSAAGLTPSGAAQGGVANAGSIAPDAAVQGAAGQSGVGSFGTVTDQLDGINIGDMLTSAASAGQSLANGLAMPTSTPNSASGAIPSSMSAASPLGAFGSGAGLGAQGGSIGSSAPGAISSRAAGSAGGSVPGMTGGPGAPGITSDSLMGARTHGASSAGAVAPMMGGAGGMSGGVVGAGGTGSQSKYARQTGSSVGSSSQSGSGLGMVGSGSGKPSISNFGRGMMPMMPMMPMGGAGGGQKNTGKVKTVTSAVEEDRNLAALLGDRGPVVPGVIGDWVRG

SEQ ID NO: 1961 - DNA, 501 bp, Corynebacterium glutamicum
  CDS (101)..(478): RXA00881
acctgaccgaggaagccgacgagctgaccccaacgctgaaggtcaagcgcaacgttgttgttcgccgttacgcagacgccatcgaccacatctacaaccgatgagtaacacagagacccaatttgattgggatggatcgacatggacccgcaccgaagtcggcgaagcaccaacacgcttcgctgtgggcgtgatggaggatttcgcctacattgcagccactggcacggacggggatgaagagttctttactttgggctcaaatccgggtctgacgtttggtgatcccgagtggcttttcgctcaggataatccgcagtatgtggtggagtgcattggccagcagggaaccgagccggcagccctgaaggttgtagataaatatttgtcgcgactatctgatgaggagtcacgtggcgaacccacgcggattctcaatgaattggtctcggcgatggagttgccggcattgccgtggtgatttttctcgggctttagtga

SEQ ID NO: 1962 - protein, 126 aa, Corynebacterium glutamicum
MSNTETQFDWDGSTWTRTEVGEAPTRFAVGVMEDFAYIAATGTDGDEEFFTLGSNPGLTFGDPEWLFAQDNPQYVVECIGQQGTEPAALKVVDKYLSRLSDEESRGEPTRILNELVSAMELPALPW

SEQ ID NO: 1963 - DNA, 801 bp, Corynebacterium glutamicum
  CDS (101)..(778): RXA00882
aaatagctgagaaattggctagaggacggctagcaaaccggatcaagaccggctagaactttagctacgaggcaagaaaaggaaggtgtgttggaacgcgatgagcagtacaaccgcacagctacgccaccgagagctgacccaggagatctacaacatcggcgacgaggtcgctgaatacattgagcacatcatggaagcagtctccgactgggatctggagctcgtggaagattgcctcgctgaattcgatgagatcatcactgaagcccgcgatgactcccgcactgttgtggctgaactttcaggcctgcgtcacgcactaaccactggtatccgtcagggcaccgtgagcgctagagccacggtggaggtggacgtcgataagccggaacgcctgaccgcctccgagctggagcgcgacttcgatattgatgccggcctcgttgatgtacgcgatctgtcgaccgcgctcaatgcgcgcacagacgctgtggttaagcgcctggaggccactgtggagtgggtgctggcggaaactgacaaggtggccaacgatctggattccctgtctctgccactgctttatggccgcgttgcagcggtgatcgaaagcgccaccagcgcatggatcaacgcagtgggcaccgccaatccggcgtatgtgcgcaccatgcgaggcagcaacccgccacgtttcctgcttgagcgtgcgcgtatcgacgctgtcgtggcccgggttgcagacaagcttgcgcaaaagcgcaacgctgtttcctagaaatctcggtgcagcaaaaa

SEQ ID NO: 1964 - protein, 226 aa, Corynebacterium glutamicum
MSSTTAQLRHRELTQEIYNIGDEVAEYIEHIMEAVSDWDLELVEDCLAEFDEIITEARDDSRTVVAELSGLRHALTTGIRQGTVSARATVEVDVDKPERLTASELERDFDIDAGLVDVRDLSTALNARTDAVVKRLEATVEWVLAETDKVANDLDSLSLPLLYGRVAAVIESATSAWINAVGTANPAYVRTMRGSNPPRFLLERARIDAVVARVADKLAQKRNAVS

SEQ ID NO: 1965 - DNA, 642 bp, Corynebacterium glutamicum
  CDS (101)..(619): RXA00883
aatatacacaccaaaaactgacatgccccaagcctagtgcctgccccctatacatgattaattgatgttaaacatagcgaattcctaagaacagggtagagtgcagggtatgaaacggaagatggtcgcagcggcgctggcaacagcgcttctttttggggctgcacctgcgcacgcttccgaattggtagagcccaccacagttgcagagtcagtggcactcgatcccaacaaagcaatcaatattctcaccccagatctctgggaagacattgaggcaaaaccaggcgatatcgtccacatcccctaccagggcacccgaaactacgaggacctcaccgtagaagtcgcgaaacctttcgaagatttccaaatcctcgtcggactcgacaacagcatcgtcatcgcagtgccaaagaacttaagtggcgcagcatcagtcgccccagttttcactgtctctgacaaaaacggtgagatcgactctttcaccatcaaagtaagcgtcgagccacgccgccaaagcgacgaagaaaagcgctccgcactatttgatgtcatctctgagcttgcctaccgcatgcctcatctgccattcgtgtcagagttgctgaagtactagaacagtaacgagaaaacccc

SEQ ID NO: 1966 - protein, 173 aa, Corynebacterium glutamicum
VQGMKRKMVAAALATALLFGAAPAHASELVEPTTVAESVALDPNKAINILTPDLWEDIEAKPGDIVHIPYQGTRNYEDLTVEVAKPFEDFQILVGLDNSIVIAVPKNLSGAASVAPVFTVSDKNGEIDSFTIKVSVEPRRQSDEEKRSALFDVISELAYRMPHLPFVSELLKY

SEQ ID NO: 1967 - DNA, 846 bp, Corynebacterium glutamicum
  CDS (101)..(823): RXA00887
aagaaatccgcaaccatcgcagcgacaacgcttccgtgcatcgcgaaggcggagaagaatccggtttctttgacaagctccgaaacaagttccgcaaataatgtcactgccagtatttatctctgattccgcagccggaccaggcgaaaccattgagctcgccggtccggaaggccggcacgccgtcaccgtcaaacggatccaggtaggcgaaaagatttcgcttatcgacggccggggtacagcgcgcacctgcacggtcaccgccttgcagggcaaagaccgcctgaacgctgtggtggatttggtcgaggaaatccccgcaccgaacccacaggtcaccatcgtgcaggctatccccaaatcagagcgttccgagctgaccatcgacctgctcacccaagctggcgccgatcggattgttgcgtggcaagcatcgcgctgcgtagcaaaatggggcggcaaggaagcaaaatcactggctaaatggcaggtggctgcggaagcagccgccaagcaatcgcggcgcgcaacgatccctgaaattcttggcgtagtgggggaggagggcgtcgaaaagcttatcgacgaatccgacctggccatcatcctgcacgaagaagcaaccgccgcgatccgtgaactggaattttccggcaacgtcgtggtgatcatcggacccgaaggtggcgtcgcgccatcggaaatttcacgcttcgtcgacgctggcgcacacaccgtgaaactaggccctgaggtgttgcgcactgcctccgcaggcatggtggcgctcgcagctatcggcgtgctgtctgaccgctggtaacatttctctgacataacctt

SEQ ID NO: 1968 - protein, 241 aa, Corynebacterium glutamicum
MSLPVFISDSAAGPGETIELAGPEGRHAVTVKRIQVGEKISLIDGRGTARTCTVTALQGKDRLNAVVDLVEEIPAPNPQVTIVQAIPKSERSELTIDLLTQAGADRIVAWQASRCVAKWGGKEAKSLAKWQVAAEAAAKQSRRATIPEILGVVGEEGVEKLIDESDLAIILHEEATAAIRELEFSGNVVVIIGPEGGVAPSEISRFVDAGAHTVKLGPEVLRTASAGMVALAAIGVLSDRW

SEQ ID NO: 1969 - DNA, 711 bp, Corynebacterium glutamicum
  CDS (101)..(688): RXA00889
tggtccgccaccaactggttggacacattgtggatgcatacgaagactatgaagaacgcgaggcccgcgaattgaaacgcaaacgccaggagacacggccatgagcattgaggtattcaacgaatcaggatacgacggcgtcaatgaagaaatgctcattgatgtcctctccttcgcactcggggaaatggacatccaccccgacgccgaagcatccatccacatcgtcgacgtcgacaccatcgccgatctccacgtgaaatggcttgatcttgaaggcccaaccgacgtgatgagcttcccgatggatgagctcacccccggctactcccgccccgacggcgccacccccggccccgccatgctgggcgacattgtgctgtgcccagagttcgcggcaaagcaagcgaccaaagcaggccacgacttagcccacgagctagctttgctgaccgtgcacggcagcctgcacctgcttggctacgaccacgtcgatccagccgaagagcgtgaaatgttcgcccttcaaaacgagctgcttgccgattggtacgacaacgtcgaagcccgtggcgtcacctaccagccaaaaccatccggcgccggtgcattccccaccgctgctgatcgtctggaattggacgaaaagatggaagcggatgactctggctttggaggcgttgagtcctaggtggaatcctcagttatatg

SEQ ID NO: 1970 - protein, 196 aa, Corynebacterium glutamicum
MSIEVFNESGYDGVNEEMLIDVLSFALGEMDIHPDAEASIHIVDVDTIADLHVKWLDLEGPTDVMSFPMDELTPGYSRPDGATPGPAMLGDIVLCPEFAAKQATKAGHDLAHELALLTVHGSLHLLGYDHVDPAEEREMFALQNELLADWYDNVEARGVTYQPKPSGAGAFPTAADRLELDEKMEADDSGFGGVES

SEQ ID NO: 1971 - DNA, 720 bp, Corynebacterium glutamicum
  CDS (101)..(697): RXA00893
acgccaacgcagagtgtttaaagaaactggcagttggaaagctgcagttgatttagcctgcgacgaactcaacgacctcaaagcactggactaaatagctatggtggaatcccaacacatcattttcatcccggaatcccaacaaacacccgacgagtttaccgaggtagtcaacgagattcccgccggaatcaaaccacggatcgtaccgtggagcggtagtgtttccgcaggtgtgcaggctgtggaatccatcctcgaccgtgaagaaatccggcgcgtcatcctggtcggcgctggaaccggagctggagtggcgttggaaattgccaagaaccaaccccgccgcgtggaacgcctcgtgctggattcaccgttggtgacctttgatgagaaacaactcaaaggcatgagcaccgcactgaaaatgatgccaggattcttcttccgaaagaagaacaagaaagacctcctgcagcaggtagaagaagcccgtactgcagttccgatgggattttccgagattaccatgccgacgttaatcatccgaggctccgctgcgaaggctggaattgattctgacttggaaaaacaaatcccgagcgctcgggctaccaccattattggtgccaattggctgacttacacaacgcatggacgccaaactggtgctgcgattgcggaattcctcgcccaatagaagggcacgcctaaacgcca

SEQ ID NO: 1972 - protein, 199 aa, Corynebacterium glutamicum
MVESQHIIFIPESQQTPDEFTEVVNEIPAGIKPRIVPWSGSVSAGVQAVESILDREEIRRVILVGAGTGAGVALEIAKNQPRRVERLVLDSPLVTFDEKQLKGMSTALKMMPGFFFRKKNKKDLLQQVEEARTAVPMGFSEITMPTLIIRGSAAKAGIDSDLEKQIPSARATTIIGANWLTYTTHGRQTGAAIAEFLAQ

SEQ ID NO: 1973 - DNA, 714 bp, Corynebacterium glutamicum
  CDS (101)..(691): RXA00895
gtcgcgccggaaagatagactaagccacatgacttcggacatgcagaattctccacagcactcggccacgccttcagaagaaaaacaaggcggactgcccatgcgcggtttggccatgattttgatcgccgtggccgtattgctcgcagcgtgggcactgtggtcaatgcagggcaaagacgacacctccaccaccagcgccggacaaacccagtccacggaaaccaacgcgggaactattgctgaatcttctggctcttcggattccgagcaggcatcagcagaacctggaacctccgaagaaacctctgctgagcagccagctgcagatggcgaagccgctaatgctgctggggccgctgctgctggtggcgctagttcggctaacggcaactccaccccagtgaacactctgtacgtgctcaacaactccaccgtcccacaacttgcagcacgagtggcagacagcctaagcggtgactaccaaaaggtagagtccggaaaccttccagacaccatcattccgcagaacactgtgtacttcaccgctggaaacaccgaagctgaaaaggctgcacgtgaactcgctgaccgcgtcagtggcgtagcaatggaacgcagcgatgcactgccaaccgaaacagaaggcaaagatgccctcgttttggtgctggtccaagacgtagcgctgtagttttctcggatttgttggaa

SEQ ID NO: 1974 - protein, 197 aa, Corynebacterium glutamicum
MRGLAMILIAVAVLLAAWALWSMQGKDDTSTTSAGQTQSTETNAGTIAESSGSSDSEQASAEPGTSEETSAEQPAADGEAANAAGAAAAGGASSANGNSTPVNTLYVLNNSTVPQLAARVADSLSGDYQKVESGNLPDTIIPQNTVYFTAGNTEAEKAARELADRVSGVAMERSDALPTETEGKDALVLVLVQDVAL

SEQ ID NO: 1975 - DNA, 815 bp, Corynebacterium glutamicum
  CDS (37)..(792): RXA00904
aagcagtgcagtaccaggctggaagtgtggacaacaatgattaataccatccgctccgaatggaccaaacttgtcaccaccaaatccttctggtggacaaccgcactaattctggtcttcagcctgggatacgcagcgctcaccggatcactcgccaccggcgaaagctttgcatcactgttccttctcgcaggcagcacagtcaccggcctttacctccttggcttcgtggtgatcatgatccaatccatcatgatgttcaccaccgaatttcgattcggctaccaaacccaaaccttcctcgccacaccaaaacgctgggttgtcgccgtttccaaatggttgctgtacctcgtgttcgccgtagtgttgaccttcatcaccgtgattctgtgcttctatctagccaaagccctggcatcagacactgcaagctccaccctggtggtgtgggaagatacgcaagcacgacgaatcatgtggcaatacccactggcagcagcactattggtaactttctgttccggaattgcgctcctgctgcgtcaaactgcaggagcagtggcactggtgcttatgtggcacttcgctatcgaaaacctcctgtctttcttgccacgcatcggcgaatacgtcggcaagtatggtcccttcaccaacctctacgcattcatcaccgactatcaatcaattgatccaggatggtccaccaccatgggagcggtgtacttcggagcgtgggcattcgtgctgttcgcactcggaatcgtcgtcctagaaaagaaagacgcctaaaatgccctctaaaatatcgc

SEQ ID NO: 1976 - protein, 252 aa, Corynebacterium glutamicum
MINTIRSEWTKLVTTKSFWWTTALILVFSLGYAALTGSLATGESFASLFLLAGSTVTGLYLLGFVVIMIQSIMMFTTEFRFGYQTQTFLATPKRWVVAVSKWLLYLVFAVVLTFITVILCFYLAKALASDTASSTLVVWEDTQARRIMWQYPLAAALLVTFCSGIALLLRQTAGAVALVLMWHFAIENLLSFLPRIGEYVGKYGPFTNLYAFITDYQSIDPGWSTTMGAVYFGAWAFVLFALGIVVLEKKDA

SEQ ID NO: 1977 - DNA, 681 bp, Corynebacterium glutamicum
  CDS (101)..(658): RXA00908
tcggtcctccacctaacaggatccttcacacccttcttttcaatatctagaaaagaccgatccgcccaacatctttttcatgacgcaaaggaccgtgtcaatgtctctctacacccgtactcaaaatacccgtcactccaccatcatcgagttccgccgcgagcagactcgtaatcacacgatggagccaatccagtccgagccacggatctacgctgacgatcctttccgtgcacgcttcggacaccaactcccccgcggacttcgcgaagaagcacgcggcatggaatggcgcaccttcaccaacacctacgcaccaaccggcaacctgcgcatcagcaacctcgagtccgaggcacgccgcggaggaatgttccacttcaacgcaaccctgatcaacaactgccagggcgagcgcaccaccaccgacgctcacatcatggcaaccggcccagtttccgcatgcaccaacttgcttgccgacgccggccgtcgcgttgaaatcctcgaattccaccaattcgacatctttgaagcaaccgtcaccttcatctacacctgcaacaacgtttcccgcacctgggcaatgggcttcggcggtacccctgagcagtccgctgcttccgcaatgagctccgcagctcacttgctctacggataggttgcaataacattcattcc

SEQ ID NO: 1978 - protein, 186 aa, Corynebacterium glutamicum
MSLYTRTQNTRHSTIIEFRREQTRNHTMEPIQSEPRIYADDPFRARFGHQLPRGLREEARGMEWRTFTNTYAPTGNLRISNLESEARRGGMFHFNATLINNCQGERTTTDAHIMATGPVSACTNLLADAGRRVEILEFHQFDIFEATVTFIYTCNNVSRTWAMGFGGTPEQSAASAMSSAAHLLYG

SEQ ID NO: 1979 - DNA, 3714 bp, Corynebacterium glutamicum
  CDS (101)..(3691): RXA00916
agcggatccaacgacacaaatggtggatttggttccagcggcggcttcggcgcgcgataacctgtaacttgcgattaaaaactaacttaaggatttacacatgaagaaagttctcgttgtcggctgtggtggttcaggtgccaaaacgctcgcttatatgatggaccagctcaagaccaccctggcggatagtcttcccgagcgttacccaaatccaaaggaagcaaaacttcctggtgcgtggcagttcgtgtcggtggatgttccgacctccccagaaagccccggcccgaaccttccgaatgttccagaagccggtggacgttatatttcctgtggttcctcggatcgctatgccaccgttgatactgcggtgtccaaccagctctcctccaggggcgcgttgggtggcgtttcttcatgggcgcttcgaaaccctgattctgaaaccaccccaattagtaaaggtgcgggccagtaccgctccattggccgtatgttgatcctgagccgacttcaggaaattcaggctgaattacgtaaatcatgggatgtgttgttcagcggtgagactgaacgtgagctcgctgaccttcgttctgcactgtatggcacgtctgtttccagtggtgaaacctctaaagagcagccaattatcttcggtgtctcctccatggctggtggcgccggtgcttcgatggctctagatatctgccgcctgctcaccggtcttgaaggcaacgcagtgggtctgagctcactgtttatggtgaccccggatatcttctcccagctttccccagaccaggttgccggaactaacccaaacgcgctggccatgtttgccgagctcgcagcagcacagatgggtgcagcttccgaagaagatgcccgactgtttaacgctttgggtgtttctgttggcgatgactccatcccagttggacgtatcttcccagtgggtattcgctccggtgaaaacggcgctctgcttggtgatggcaagccagataccgtctaccgcgcactcggccgtggccttgcagctctgatggctgatgaagtgtccatggacaacttcgagcaattcaccctcggcaaccgtggtggcggaagtgccgatcagagcaagtacgcatggggtgcacaggaagctaagaacattccgtggggcagctacggctactcacaactatccatgggtcgtgatcgctacgcagaatacgccgcccagcgactggcacgctctgccgtggatcgtctgctcaagggacactttgatccaagcaatgatgcggcctctgaccagcagcttcaaaagcgactcgagaacaaccgtccatcgctgatgggcaacctcagcgacgttttgcccgtcaacgcgccggcaggggactggattttccatagtttcaaccagatgattgaaaactggacccagcgtatgaaagcaatcatcaagagccaaattcctgcagctaatggccagcgcggaagtgaatggctcggggatgtccagcgtgctttccaatcatccagccagatgattgataatgactcccgccatgagctctacatgggtgtcgccgactgggccagtgctgatgtgttgcagcgccgagtagtcgagttgcttcgtgatgagatcgcaaaactgggcgttccttacggcgtcagcgtgatcgaatctctcagcgccacaatccaaaaccaactcatcggacagctttctgatctggcaaacaaccgtgcacctgaggctgttcaactagacgatgtcagccgcagtgaactggacaacagcaagggcaggatcgacgattctgacagctacatccaggaaatcgtgtcacgatccactggtcaactacacacccgcgcagtgcaatacattgcggaccacatggcttcggttctggacgatttcctcaaaaatttcatctacccacttcagcgcaccatccaacgtgagcaccactccctagaaaaggactaccagctcaccaacgatgtgaacctgggaatctcccagctgaaaaccaacgttccagcactgtggccagatgaatctcaaactaccgtcccgtcacgtttcagtcaggcagccaacgaagtcttcctgaccgatgtcgcctccttcccggagcagttccaagcacacgtccgctcgtccaccgatgacatcaacgaacaaaacgattactcgagcgccctgcaagaggcctcaactcgagtagtcagcggtgtgtgggaatccaagtccggctctgaaaaagcaccacgcgatctcatccgcctcatcgacgtatgggttgcccgtgacctgaccagggatccgtccggttcgggaagcctccgcgaccctaagcaagcacgctttgagctgaagattgataccggcgaagtactcgagcgctcccgccagtacatccgccgccctggtttctccttccagcagttcatcgccagctcactgcgtgaattcatcaccgcgccgggcttggcagaccacgagcgtcgcgcgcgccgtcagcaggtgctgagcaagttcagtgaggcaatgacctacgcgcttccattggctcagatcaaccctcaactggttcgtgcgctttacggcgatgaagtccgctacaacttcaacttctctcgcatcccatttgccggcgatgagcttggatccagcctggaacaggcagttcgtgattacccgaaccaccgaccagcagatatttccaagccactgggcaaggctttggtctcccaaggtgaagagcgttccattgatatcttcggctcttaccccaactacgcgccgatcgtgtttgactccctgctgcctccaatcgagaagcagtggcgtcagatcaccggcgatcgcacggaattctggcatggccgccgtactcgtcctttgactgctgcacttccaatgacagacctagagcgcaacgccatggtcaagggttggtacatcggtcgtctggtcggacgagtattcttccccgcaactctagacactgcggataccactccagtgcagatctacgatgagaagtctgattcgtggatcaacttctccaccccaatgctcaccccagtgtcccgtttccgtggaagcctcgattggctgccaaaccttctggaatcagcatcattggcatgggcacgggcaggcgagcgtcctgtctttgaatccgtcgagccttacatccagctccgccaactgtgggatgatgctgcgagcccatccttgccaggacgcaccacccgcggtgagaagctgctgcacgattggcttttcgacggcaaccgcatggctggaaacgtcctccagatcccaggaaccgaagctggtgtcaccccagctgcacgttttgaggctgcgaagaacttcctgcagcgccagaacgagatctcgcaaaattacgtcccaagcgacaagcttcgccaaggccgtctgttcaccaccgctgatcgtccatttggcgacgtcaaggatcgtgaactagcagcacagattccagtgtttgctgaccttgcagccgatgtttttgatggcacccaagaaatcatcgacatcctggaaaagtgcttggctgcaggtccaccatcagcacaggtctttgacatgaacgtagctcgccgcgacgtttcttcaggaccttctctacctggtgagggtgagttctaaatgtccgccgcctattcgca

SEQ ID NO: 1980 - protein, 1197 aa, Corynebacterium glutamicum
MKKVLVVGCGGSGAKTLAYMMDQLKTTLADSLPERYPNPKEAKLPGAWQFVSVDVPTSPESPGPNLPNVPEAGGRYISCGSSDRYATVDTAVSNQLSSRGALGGVSSWALRNPDSETTPISKGAGQYRSIGRMLILSRLQEIQAELRKSWDVLFSGETERELADLRSALYGTSVSSGETSKEQPIIFGVSSMAGGAGASMALDICRLLTGLEGNAVGLSSLFMVTPDIFSQLSPDQVAGTNPNALAMFAELAAAQMGAASEEDARLFNALGVSVGDDSIPVGRIFPVGIRSGENGALLGDGKPDTVYRALGRGLAALMADEVSMDNFEQFTLGNRGGGSADQSKYAWGAQEAKNIPWGSYGYSQLSMGRDRYAEYAAQRLARSAVDRLLKGHFDPSNDAASDQQLQKRLENNRPSLMGNLSDVLPVNAPAGDWIFHSFNQMIENWTQRMKAIIKSQIPAANGQRGSEWLGDVQRAFQSSSQMIDNDSRHELYMGVADWASADVLQRRVVELLRDEIAKLGVPYGVSVIESLSATIQNQLIGQLSDLANNRAPEAVQLDDVSRSELDNSKGRIDDSDSYIQEIVSRSTGQLHTRAVQYIADHMASVLDDFLKNFIYPLQRTIQREHHSLEKDYQLTNDVNLGISQLKTNVPALWPDESQTTVPSRFSQAANEVFLTDVASFPEQFQAHVRSSTDDINEQNDYSSALQEASTRVVSGVWESKSGSEKAPRDLIRLIDVWVARDLTRDPSGSGSLRDPKQARFELKIDTGEVLERSRQYIRRPGFSFQQFIASSLREFITAPGLADHERRARRQQVLSKFSEAMTYALPLAQINPQLVRALYGDEVRYNFNFSRIPFAGDELGSSLEQAVRDYPNHRPADISKPLGKALVSQGEERSIDIFGSYPNYAPIVFDSLLPPIEKQWRQITGDRTEFWHGRRTRPLTAALPMTDLERNAMVKGWYIGRLVGRVFFPATLDTADTTPVQIYDEKSDSWINFSTPMLTPVSRFRGSLDWLPNLLESASLAWARAGERPVFESVEPYIQLRQLWDDAASPSLPGRTTRGEKLLHDWLFDGNRMAGNVLQIPGTEAGVTPAARFEAAKNFLQRQNEISQNYVPSDKLRQGRLFTTADRPFGDVKDRELAAQIPVFADLAADVFDGTQEIIDILEKCLAAGPPSAQVFDMNVARRDVSSGPSLPGEGEF

SEQ ID NO: 1981 - DNA, 486 bp, Corynebacterium glutamicum
  CDS (101)..(463): RXA00926
atggagacacctggggctggaaccaccagaaggcaccatcggcgattattagccaccttaggtggccaggatgttccatggtctggcaaactaactaaccatggacatcgttttcctcataattcttctagccatttttatcgttcccactttcctcatgagccgccgccagcgcgcacggatgactgaaatccaaaagctgcaggactctgtcgtcccaggcgaccgcatcgtcaccaccgcgggacagcacgcaacggtcatttccaccactgcagaaaccgttgatctagagatcgcgccgggtatgatcagcacttttgaaaagcttgctatcgtgcgtgtgctgtccaaggccaatgaacctcagatgttggatgagccgacgctgtttgatcagccagaagacgatcagccgaacgatggtttcgatggacgcactgacggacatcctgagaatcgttagaaattaataataattcagca

SEQ ID NO: 1982 - protein, 121 aa, Corynebacterium glutamicum
MDIVFLIILLAIFIVPTFLMSRRQRARMTEIQKLQDSVVPGDRIVTTAGQHATVISTTAETVDLEIAPGMISTFEKLAIVRVLSKANEPQMLDEPTLFDQPEDDQPNDGFDGRTDGHPENR

SEQ ID NO: 1983 - DNA, 876 bp, Corynebacterium glutamicum
  CDS (101)..(853): RXA00930
acggcgcaccacacatttggtggtgtattgagctatctctgggctgcgtgagaaaccattttccggtggatgatggaagctagacgacgaaagggagcatatgtctggccactcaaaatgggcgactaccaagcacaagaaggctgctaacgacgccaagcgaggcaaggaatttgccaagctgatcaagaacatcgaagttgcggcacgtacaggcggtggagatccgtctgcgaacccaacgcttgatgacatgatcaagaaagccaagaaggcttctgtgccgaacgataacatcgaacgtgcacgcaagcgtggctccggcgaagaagctggtggcgctgactggatgaacatcatgtacgagggatacggccccaacggcgttgccatgcttatcgagtgtctgaccgacaaccgtaaccgcgcagctaccgaagttcgcaccgcaatgaccaaaaacggtggcaacttgggcgagtccggttccgtgtcctacatgttcacccgcaccggtgtcgtcaccgtacaaaagggcgatcttagtgaagatgacgtgctcatggctgttcttgaagctggtgctgaagaagtcaacgacaacggcgatctgttcgaggttacctgcgcaccaactgacattcaggctgttcgcgacgcactcgtggaagctggcattgaagtagaagattctgaatcagacttccgggcatctgttcaggtccccctggacgctgacggtgcacgcaagatcttcaagcttgtggacgcgttggaagattccgacgatgtgcaaaacgtctacaccaacatcgacttgagcgatgaggttttgacagagctggaaaacgactagttcgtattttccgcactccg

SEQ ID NO: 1984 - protein, 251 aa, Corynebacterium glutamicum
MSGHSKWATTKHKKAANDAKRGKEFAKLIKNIEVAARTGGGDPSANPTLDDMIKKAKKASVPNDNIERARKRGSGEEAGGADWMNIMYEGYGPNGVAMLIECLTDNRNRAATEVRTAMTKNGGNLGESGSVSYMFTRTGVVTVQKGDLSEDDVLMAVLEAGAEEVNDNGDLFEVTCAPTDIQAVRDALVEAGIEVEDSESDFRASVQVPLDADGARKIFKLVDALEDSDDVQNVYTNIDLSDEVLTELEND

SEQ ID NO: 1985 - DNA, 597 bp, Corynebacterium glutamicum
  CDS (101)..(574): RXA00932
cccaattaatttatgcacttcggtgaggttactcacaaagagtagcgtgcaaagcccagcaataaggtgatgtttcaacgattaggttacggtaggggccatgacgccacagaaacttcaccgttttgcagcccttttagaaatgggtacctggaccctgctgatcatcggcatgatcttaaaatacagtggagtgacagacgccgtaacccctattgccggcggtatccacggctttggcttcctctgttttgcagccatcaccatcaccgtgtggatcaataataagtggacattcccgcagggtatcgcaggtttgatcgtctctgttatcccgtgggctgcattgccatttgcattgtgggcagacaagaagggcctcgttgccggcggatggcgcttttcagatccgtccgaaaagccacacactttctttgacaagatcttggctcaattggtcaggcacccaatccgatccattttaattctgctggtgattatcgccgtcgtcttctctatcttgctggcgatgggaccaccttatgatccagatgccatcgcaaacactgtggattaaacaacagcctccttcacatg

SEQ ID NO: 1986 - protein, 158 aa, Corynebacterium glutamicum
MTPQKLHRFAALLEMGTWTLLIIGMILKYSGVTDAVTPIAGGIHGFGFLCFAAITITVWINNKWTFPQGIAGLIVSVIPWAALPFALWADKKGLVAGGWRFSDPSEKPHTFFDKILAQLVRHPIRSILILLVIIAVVFSILLAMGPPYDPDAIANTVD

SEQ ID NO: 1987 - DNA, 585 bp, Corynebacterium glutamicum
  CDS (101)..(562): RXA00933
ccgcggggctaaagcgcgcaaacgcctacgactggtcgacagtatccacccaggtcatggcagtctatgaaaccattgcgatcgacaaagtgaggcttggatgacccttgtttacctcctcatcgctgtcgttgtcaccgcaactgttctgtgggcgtatttcacagcacaacgcctcaaccggctccacatccgcaccgactcagcaagacaagccctgcaagcagcactggatcgccgagcagcactagtaggtgcgttgttgcccgatgcagcagaagcctcaaaacgcgctgaggcaattcccctggaatactcccgcttctcccaacgcgcccgcgccgaacgagaaatctctgaactcatcttgaaacaggggaagacccttccagattccatcgtggacgctgccacccgcgtggaattagcccaccgcttctacaacgaagccgtcagtgacacccgcgatcttcgaacccgattgatggtcagatccttccgactcggcggcaccgcacccttgccggagtacttcgaactactcgatacagatctgctgacttaaatgtaaaaaagcctccttca

SEQ ID NO: 1988 - protein, 154 aa, Corynebacterium glutamicum
MTLVYLLIAVVVTATVLWAYFTAQRLNRLHIRTDSARQALQAALDRRAALVGALLPDAAEASKRAEAIPLEYSRFSQRARAEREISELILKQGKTLPDSIVDAATRVELAHRFYNEAVSDTRDLRTRLMVRSFRLGGTAPLPEYFELLDTDLLT

SEQ ID NO: 1989 - DNA, 519 bp, Corynebacterium glutamicum
  CDS (101)..(496): RXA00940
tgctcaacggcacgctgaagggcacggacatggacatcatcacggcaggcgacccggacgtggtcgcggtggacgtgctggcagaggcgatctgcgcaatgtgattttggtgctgctggaagctgagtcaatgcgcggctaccagatcatcaccaccatcagtgagcaaacagaaggtaactggactccaagcccaggaaccatctatccaaccttgtccatgcttgaagatgaaggcctgatttccatctcccatgaaatgggcagaaaaatggcgcgccttacagaagaaggcgcgcaggaagtggcaaagaacaaggatgcgtggggatcaattctggaggcttatcgcaatccagaatcccgagaggtgcgggtgtttaacattcgctctgagtttcacaaggtcagggaagcagcgaaagctgctcccgacgataaagcagagcaaataatcgagattttaaggagagcagcagatgacatcaagagactataaccccagtaccatgcagctgc

SEQ ID NO: 1990 - protein, 132 aa, Corynebacterium glutamicum
VILVLLEAESMRGYQIITTISEQTEGNWTPSPGTIYPTLSMLEDEGLISISHEMGRKMARLTEEGAQEVAKNKDAWGSILEAYRNPESREVRVFNIRSEFHKVREAAKAAPDDKAEQIIEILRRAADDIKRL

SEQ ID NO: 1991 - DNA, 771 bp, Corynebacterium glutamicum
  CDS (101)..(748): RXA00949
gctcaaggatccttcctgggcaaaccaagcagccctcgcactaggtgcggaacccaggtatgttcaccaatacgactacgtactttaaaggagagttgacatgaaggttttcatcatcggcgctgcgggtggcatcggcaatcgactttccagcctgcttcacgccaggggagatgcagttagcggcatgcaccgcaatcttgagcaggcctcaaaaatcacagacactggggcaactgccgtactcggggatctcatccacaacagcacggaggagcttgcggagcttttccgcggtcacgatgccatcgtattttctgcaggcgcccacggaacagggcaagaaaataccacgcttatcgacggcgccggcctccgtaaagccgccgacgctgccagcgcggccaacgtttcacgcttcatcttggtctctgcgtttccggaatcctcccgcggggagaacaccaccgagaactttgagcactatatgaaggtgaagaagtccgccgatgtctacctcagtcacactgacctagactgggttattgtccgaccaggcgtgcttcaagatgaggcaggggatggtttagtcactgctggcttagcgattaattacggcaatgttgctcgcgataatgtcgcagcgttcattgatgaagctctgcatcaaccgcagttgtcaaagatcattgttgaactcaccgacggttcaactccggtggcggaagccgtagaacgcctcatcaagtaaagacgaaaagagggagaatg

SEQ ID NO: 1992 - protein, 216 aa, Corynebacterium glutamicum
MKVFIIGAAGGIGNRLSSLLHARGDAVSGMHRNLEQASKITDTGATAVLGDLIHNSTEELAELFRGHDAIVFSAGAHGTGQENTTLIDGAGLRKAADAASAANVSRFILVSAFPESSRGENTTENFEHYMKVKKSADVYLSHTDLDWVIVRPGVLQDEAGDGLVTAGLAINYGNVARDNVAAFIDEALHQPQLSKIIVELTDGSTPVAEAVERLIK

SEQ ID NO: 1993 - DNA, 170 bp, Corynebacterium glutamicum
  CDS (1)..(147): RXA00969
atccgacaggaagagcgcgatgatgatgcacgtctgatcgtggtcacccactctgcgctggaatctgatctttcccgcaccgttgaactgctgaaggctaagcctgttgttaaggcaatcaacagtgtgatccgcctcgaaagggactaattttactgacatggcaattg

SEQ ID NO: 1994 - protein, 49 aa, Corynebacterium glutamicum
IRQEERDDDARLIVVTHSALESDLSRTVELLKAKPVVKAINSVIRLERD

SEQ ID NO: 1995 - DNA, 726 bp, Corynebacterium glutamicum
  CDS (101)..(703): RXA00973
ttgttggtgcaggccttacagccattgcactgagttccatgctgtcgcagccagtacaggccttcaccatgaccattgagatggtgagtgtatttttcacatgaaccactctgacgacgatcgcatgcaaaagtggttccagatccgccgcgaactgggcaaagaaattgtgaaacagcttcaaaaggatctgcccgcagtcgcctctgacatcggctccatggtgtattcctctgatcaagttcccctcggaaacgccacgctcactgcatacggagacatcggcaaccgagtcgcttccgctgcaacaagtgcgagatacaacgtagaggaactcctggacgcaatcgaaaacgcacgatttgccatctgggttccaaattacgacaactcctactacctctccggcgaggaaggtgccgacgaattccaaacatacctcatcaaagatgcgtcaagatttcttgaatcctccgggaatactccacccgagaacccgcagtacagcgactccaaattaacctttgctagcgaactactccccttctacaccgcatttaacaactcgacctacccactacttcatgcttgtgtgcaaggtgaaccaactgaagtagacctctacttctacgagctcgagcaggcagaattgaaggaaaaagagactgcacagctctcgagtggatcaagttttggctccagttagtcagaattctcctaaagggc

SEQ ID NO: 1996 - protein, 201 aa, Corynebacterium glutamicum
MNHSDDDRMQKWFQIRRELGKEIVKQLQKDLPAVASDIGSMVYSSDQVPLGNATLTAYGDIGNRVASAATSARYNVEELLDAIENARFAIWVPNYDNSYYLSGEEGADEFQTYLIKDASRFLESSGNTPPENPQYSDSKLTFASELLPFYTAFNNSTYPLLHACVQGEPTEVDLYFYELEQAELKEKETAQLSSGSSFGSS

SEQ ID NO: 1997 - DNA, 738 bp, Corynebacterium glutamicum
  CDS (101)..(715): RXA00978
tcctgggtagcatgggcttatgagcactgatagccaaaaccctgtaagaaaatcctgcgcacagccacattcttgttcccaagaggtgcgattgaaagcgatgtccaggtcaccgcttactaaaggtctaaatcaacttgaacacctcgagttagataagtcactaactgcgtggtcgtgggcagaagatgatcctttgtacctcgcaggtgagaacttaaacggcagttacctcattgtcgcaggacgagtgcgggtctctcgcgacaccatcgacgggaaagaactcaccgttgatattgcaacgcccggcgatgttattggtgcgatagatacagaacctcagccggcagtagattccgcttgggcaatagaaaccacctgtgcgctgtttcttccagcaaccgcgttggcaactgtgattgaacagcatccaagttttgctttggcgatgattcggatgcagcagcaacgtttggctacagccagagatcatgaaattaacctgactacgaccacagttgagcaacgagtagctattgcagtgagaactctgggacgaaaaatcgggcaacgacgacccgatggaatcttgctcattcaagttcgaatccggcgggaagatgttgcgggtttagcaggcaccaccgtggaatctacttctagagttttggcgcgattacgtaaagaaggggtcattgatagcggtagggaatgattgccgtggtcgatgaacgg

SEQ ID NO: 1998 - protein, 205 aa, Corynebacterium glutamicum
MSRSPLTKGLNQLEHLELDKSLTAWSWAEDDPLYLAGENLNGSYLIVAGRVRVSRDTIDGKELTVDIATPGDVIGAIDTEPQPAVDSAWAIETTCALFLPATALATVIEQHPSFALAMIRMQQQRLATARDHEINLTTTTVEQRVAIAVRTLGRKIGQRRPDGILLIQVRIRREDVAGLAGTTVESTSRVLARLRKEGVIDSGRE

SEQ ID NO: 1999 - DNA, 424 bp, Corynebacterium glutamicum
  CDS (60)..(401): RXA00986
ctactttgataacaccgccacccaagccaagccggagtgatctccgtatcctttaaggcatgactttaaaagataagtacgacactgaagtagctgtttctaataatcaggacaagcaccaatttgaggtcagttaccctgaagatgccgtgactgctggctttgctgcataccttgataaaggtgattcgcggatcttctatcacaccgttgttggcgatgaattcggtggcaagggacttgcgtcaattcttgtttcagaggcgttaaaagccacaaaagaagctggtcttaccgtggttccggtatgtccctttgttaaaggattcgtggaaaagaacgcattcgagggttaccgcaaaccaaaccatgaggatatggagctggtgaagagccagatgtagaaactactcaacttccagaa

SEQ ID NO: 2000 - protein, 114 aa, Corynebacterium glutamicum
MTLKDKYDTEVAVSNNQDKHQFEVSYPEDAVTAGFAAYLDKGDSRIFYHTVVGDEFGGKGLASILVSEALKATKEAGLTVVPVCPFVKGFVEKNAFEGYRKPNHEDMELVKSQM

SEQ ID NO: 2001 - DNA, 588 bp, Corynebacterium glutamicum
  CDS (101)..(565): RXA00987
cgcgggctgcttaccacgcagcacagctaagctttaaggccctccggggccttttttgcttttcgacgcctacctccttcggaggcgtattctgtcgttcatgcctaaatctctgacctttgaagacagcattaacatcgcagcgcccatcaatcaggtctacgcactagtttctgacatcactcgaactggagaatggtcgcccgtgtgtgagaaatgctggtgggatgaagacgaaggccccgtcgtgggtgcgcactttactggccgaaacgtcacacctgagcgcacctgggagacacggagcgaggttatcgtcgcagagccaaatcgttgctttggttggagcgtgactgatggaaacgtcaagtggatttattccatggaaccgttagaagaaggcacagtattgactgaatcatgggaatttacccccaaaggtcaacgattcttccacgacaaattcggcgacaaatcaattgaagaaattgaaaagcgacgcttggcagctataaccggaattccagaaacactggttgccattcagcgcattctggaagttgagtagtttctacatctggctcttca

SEQ ID NO: 2002 - protein, 155 aa, Corynebacterium glutamicum
MPKSLTFEDSINIAAPINQVYALVSDITRTGEWSPVCEKCWWDEDEGPVVGAHFTGRNVTPERTWETRSEVIVAEPNRCFGWSVTDGNVKWIYSMEPLEEGTVLTESWEFTPKGQRFFHDKFGDKSIEEIEKRRLAAITGIPETLVAIQRILEVE

SEQ ID NO: 2003 - DNA, 546 bp, Corynebacterium glutamicum
  CDS (101)..(523): RXA00988
tagcagaagacaccgatgtacagtccggatcaggtgttgtgatcaccggttcaatcgtgaccgccggcgatgcgcgcacgctgtttggaaaggaacctgcatgagcaagcgtgaagaatcaattgagtacggaccattaggcaaaggccacgatccattaaaggatcccatgaagggtatccgaggtgtcatggccggcaccttagtgatggaagcaatcaccttaggtcttgttctcaccgtgattctgcgcgtggacgacggcatctactggaccaccttcaactgggtctatgtatcagcagtcgcgatcgcacactttgttgctgcatttctgcaaaggtttagttggtccatcccgatgaacatcgtgctgcaggttcttgcacttgccggtttctttgttcaccccgcgatgggcttcgccgccatcatcttcatcatcgcgtgggcgtacctgttctacctgcgctctaatctgattgatcgcatgaaacgcgggctgcttaccacgcagcacagctaagctttaaggccctccggggc

SEQ ID NO: 2004 - protein, 141 aa, Corynebacterium glutamicum
MSKREESIEYGPLGKGHDPLKDPMKGIRGVMAGTLVMEAITLGLVLTVILRVDDGIYWTTFNWVYVSAVAIAHFVAAFLQRFSWSIPMNIVLQVLALAGFFVHPAMGFAAIIFIIAWAYLFYLRSNLIDRMKRGLLTTQHS

SEQ ID NO: 2005 - DNA, 969 bp, Corynebacterium glutamicum
  CDS (101)..(946): RXA01005
tgggcaccgtcaacgattggactcacgaaagctccgacgactagaaatagtaactgtgttggacacttttcacctccgcgtattgagcgaggatgagtggatggaactagcccgcgcccaccacgcgcgggctgattcattcaccaaagaccacttgaagcgtcgacaagcgcatatcaagcaccccgtcttcgacttcctcttcgagtactaccccgtgcgcgtcgcgcacctaaaaacctggcaccccggcatcggcgtgtttctagaaggcacaccgccgcatgccaccatgcgcgattttttgcttgtcgacgcctccctccatcacgcagccggcgtccagcttgacctggcctcctatatgcaacgccgtgggtcctctgtgcgctacatccacgaactgttgtccgccacccgcgacaaccacgcccaatttgattgttttggtctgcacgaatgggcaatggtgtacaaatcaaacgatctccgccatgaccttcccctgcgccttaccccatcggaaaccgaccgtgtggtggaaagccacaacatcaaatgcacccactttgatgcctaccgattcttcaccacaccagccatcccgttgaacctcacggtgttaacccgcgaagatcagccacgcaacgatcaatgtggttgtctgcatgccacgatggatctatacaaatggtccgcaaagcttggccctcttgtgccaggtgatcttttcttggacgcgtttgaactagcccgcgacacccgcatcttggacatggaggcttcgccttacgacgtccgcggatacggctttggctacgtccccattgagaccgccgagggcaaagccgaatatgtcagtagacaacgcgagctgtctgaacgagcaaaacccatccgtgaccggcttgtctccattactaaacaagctctacaggctagtatttagaaaattagacttgtcaatgt

SEQ ID NO: 2006 - protein, 282 aa, Corynebacterium glutamicum
MELARAHHARADSFTKDHLKRRQAHIKHPVFDFLFEYYPVRVAHLKTWHPGIGVFLEGTPPHATMRDFLLVDASLHHAAGVQLDLASYMQRRGSSVRYIHELLSATRDNHAQFDCFGLHEWAMVYKSNDLRHDLPLRLTPSETDRVVESHNIKCTHFDAYRFFTTPAIPLNLTVLTREDQPRNDQCGCLHATMDLYKWSAKLGPLVPGDLFLDAFELARDTRILDMEASPYDVRGYGFGYVPIETAEGKAEYVSRQRELSERAKPIRDRLVSITKQALQASI

SEQ ID NO: 2007 - DNA, 1830 bp, Corynebacterium glutamicum
  CDS (101)..(1807): RXA01007
tctgaaccaatataccgatcagtctaaaagtgtgttaagttctggaacataaattagctgacacgtaaagtaacttaaagattcactggaggtaagcctagtgtttaaaaagcacagacacggtctcggctcccccgaaaccaaaccacgctcaataacccgccggtttttcaccgcggccgccgctacgctggcaggattggcagtcctgtccggctgcacagcacaaccctcacaagcagaagacaacacgctcacttacttagagccacagttcttccgcaccctgtacccaccatcagcgggcttttaccccaacggcagtgtggtgaacaacattgcagaccgcttgctctaccaggatcctgaaaccttggaactcaagccgtggatcgccaccgaactcccagaagtaaacgaagacgccacggaatttaccttcaacatccgcaccgatgtcacctactccgatggcaccccgctgacggctgaaaacgtggtgaaaaacttcgatctctatggcctcggcgatcaagatcgacgcctcaccatctctgagcagatcaccaactacgaccacggcgaagtagtagatgaggacaccgtccgattccacttctctgagcctgcacctggttttgctcaggccaccagctccttcaacgctggcctttatgccgattccaccttggagttcgccaatgaggatttcgcgccaggcaacgcccaaaacgtcatcggctccggtcctttcgtgatcaccgatgaaaccctaggcaccaacctcaccttgactgcgcgtgaggattacgattgggcaccaccatcacgcgaacatcaaggtcgcgcgaagcttgacgccgtcaattatgtcctcgcgggtgaagaatccgtccgcatcggagccatcgttgctggccaaggtgatatcgcccgccagatcgaagcgccagtggaggcacacctgaaggatgcaggcatcccgatcatctccgcagccaccaacggtgtgaacaacagcttcaacttccgcttcaaaaacgagctgctctcagacatccgtgttcgccaagctctgatccacgcgatcgaccgcgaaaagatcatgcgtgtgctgtttagtgattcctatccgctggcaacttctgtgcttgcgcaaaatgcactgggctacaaagaacaagtagatgcctatgtctacgacctagacaaagcaacagctctgcttgacgaagccggctggacccttgatagcgacggcatgcgtcgcaaggacggtgaacttctagagctcaccttcaacgaagccctcccacagcctcgttcacgcgaagttgtcaccatggtccaagaacagctcggtgatctgggcatcaaggtcaacctcaacccaggtgaccaagcagcccaggacgctgactccaaggatctcaacaagatccaggttcgccacaccatggtgggtcgcgcagactatgacgtgctgaaatcccagctgtactccaccaaccgcaacgagctgttgaacatgaccgtggaaggggagaccgccgatattggcgatcctcatttggaggaactcctcatggctattgcatccagcccacgcgaagaggaccgtgcagcagcatctgccgcagcacaggattacatcaccgagcaggcatatgttcttccactgtttgaagagccagttgtctacggcgtgcagccttacgtgaagggctttagccccgaagtgatcggccgccccagcttctatgagacctacattgaccattccagcgaccattccagtgaggaggactaaatgactacctcgcagattct

SEQ ID NO: 2008 - protein, 569 aa, Corynebacterium glutamicum
VFKKHRHGLGSPETKPRSITRRFFTAAAATLAGLAVLSGCTAQPSQAEDNTLTYLEPQFFRTLYPPSAGFYPNGSVVNNIADRLLYQDPETLELKPWIATELPEVNEDATEFTFNIRTDVTYSDGTPLTAENVVKNFDLYGLGDQDRRLTISEQITNYDHGEVVDEDTVRFHFSEPAPGFAQATSSFNAGLYADSTLEFANEDFAPGNAQNVIGSGPFVITDETLGTNLTLTAREDYDWAPPSREHQGRAKLDAVNYVLAGEESVRIGAIVAGQGDIARQIEAPVEAHLKDAGIPIISAATNGVNNSFNFRFKNELLSDIRVRQALIHAIDREKIMRVLFSDSYPLATSVLAQNALGYKEQVDAYVYDLDKATALLDEAGWTLDSDGMRRKDGELLELTFNEALPQPRSREVVTMVQEQLGDLGIKVNLNPGDQAAQDADSKDLNKIQVRHTMVGRADYDVLKSQLYSTNRNELLNMTVEGETADIGDPHLEELLMAIASSPREEDRAAASAAAQDYITEQAYVLPLFEEPVVYGVQPYVKGFSPEVIGRPSFYETYIDHSSDHSSEED

SEQ ID NO: 2009 - DNA, 2064 bp, Corynebacterium glutamicum
  CDS (101)..(2041): RXA01008
atttatgttccagaacttaacacacttttagactgatcggtatattggttcagaccaacctgtctaattggggtatttattttaatgatcaggagttttcgtgagcacaaccgataagcaggtagccatcgttggagttggccccagaggtatttccatactcgaaaggatcgcagcagctctcaacacagtttcccgccccaaacaaggcttgaccatccacctgattgaggatgcccagatgggtgcaggcaacgtgtggcgcactgatcaaacccgcacgctgtgcatgaatactctggccggtgcggtgacattattcacagagccaggctctacggtgagcgctccagtggtggaaggaccactgcaatttgattggattcgcctgctgcgcggcgatgaggatttgagcggcattcctacaaaagccatcgagctgttccgcacctaccccccagctgcatccgtggcggaggatttcaaggaagagctagcagccactgttatccagtccaatccttcccgtgctctttatggcgcatatctgcggtgggctttcgatgtcgctttgcagctgttgccacagtgggtcaaggtcgagcagcaccatgcgcgcgcgattggcatccgcgaagatggtgaccgcgatgtgatcaccttagataattctgagatgatttccgccgattccactgtgttggctgtcggctggcaaacccccgcccccaatgcggaggagctgtccatcgcggctgctttggaggagaaccctgatctggtgtgggtcaagcccggcaaccctgtcgagcaggatgccagcctcattcccgctggcgaacaggtgcttgtccgcgggctgggcatgggatttttcgatatcatggcgctgaccaccatcgatcgtggcggcatcttccacgaggatcccagcacccgttccggtttgcgctacgaggcatctggtgaggaaccacactttgttatttcctccgggcgcggctacccctacctgcctaaatccgattacaaatcgctgccaccaggggcaaagctagcgcgactcaaggctgttatcgcggcgatcaacgcgcaaaatcgtggtgtcgcatccatcaactatgatgcggaagtgtggccagctgttgctcgcgacgcctacgaagcctattacgaaacccttgatcgcgtaagcccagaatctatccggaccggtctggataaaattgtggaaattattgatgaggtggacgtcgataagcttcctaaagcactcgccgcgcacaccgatgacgtctttgacctgcatgcttgggaatttccgctcgcgggaattaatgaaagcgtcgaggcgctgaccgcacgcatcgcggacggcatggcccgcgatattcgccatgcagtaacggcctgggacagcccgctgaaatccgcgctgtggtccatttccgccgcgcgcaaacccagctccatcctgggcgcggaaggccgcctgaccttcgaatcgcgccgcaaccgcttcgccgccgtcatggcgatcggccagatggtcggctccggcccaccgcttttccgcacccgcgaacttcttgcgcttgtcgacgccggcctcgctcacttcgccggcgcccgcccccgcctcagcgtgagcgacggtcaatggcagatctcctcgcccaccaccggcgatacgccgctgagatcgaaagtgcttgtcgacgcgtggatgcacaacccagatgtgcgtcgcaacgccgacccgctagcactgtctttggaagatgccgaccgggtacgccccttcaacgactattccgtcgacggaaccgctgcccccacaggctcccccgaagttgatccggcaacccgacttttggttcaccccaacggcaacctcgatccgcgcgtgcacctgattggcatcccaacctatgggcagctggccgacaccaccatctcgccgatgcctggaaccaacccgctcatgctgcaagaaaccgacaaaacagccgttcacgtgctaaagcagctcggcttgatctagggtgaggtgagttatttaaa

SEQ ID NO: 2010 - protein, 647 aa, Corynebacterium glutamicum
VSTTDKQVAIVGVGPRGISILERIAAALNTVSRPKQGLTIHLIEDAQMGAGNVWRTDQTRTLCMNTLAGAVTLFTEPGSTVSAPVVEGPLQFDWIRLLRGDEDLSGIPTKAIELFRTYPPAASVAEDFKEELAATVIQSNPSRALYGAYLRWAFDVALQLLPQWVKVEQHHARAIGIREDGDRDVITLDNSEMISADSTVLAVGWQTPAPNAEELSIAAALEENPDLVWVKPGNPVEQDASLIPAGEQVLVRGLGMGFFDIMALTTIDRGGIFHEDPSTRSGLRYEASGEEPHFVISSGRGYPYLPKSDYKSLPPGAKLARLKAVIAAINAQNRGVASINYDAEVWPAVARDAYEAYYETLDRVSPESIRTGLDKIVEIIDEVDVDKLPKALAAHTDDVFDLHAWEFPLAGINESVEALTARIADGMARDIRHAVTAWDSPLKSALWSISAARKPSSILGAEGRLTFESRRNRFAAVMAIGQMVGSGPPLFRTRELLALVDAGLAHFAGARPRLSVSDGQWQISSPTTGDTPLRSKVLVDAWMHNPDVRRNADPLALSLEDADRVRPFNDYSVDGTAAPTGSPEVDPATRLLVHPNGNLDPRVHLIGIPTYGQLADTTISPMPGTNPLMLQETDKTAVHVLKQLGLI

SEQ ID NO: 2011 - DNA, 1356 bp, Corynebacterium glutamicum
  CDS (101)..(1333): RXA01011
cccgcaaaccgatttcactcgccgactcatcgacgcgatcccaggatcgcgctatcgtggtggcgaactcaatcttggactataggagcagatcttaaaaatgtcagatctcatcgacatgctggttggagaagacctcccacagctgcgtgacaaccgtccccaagctcgcgacaatgcacaaaagagcttcgaagctctgctcgaaccggtcaacccaggaaccttcagcttcggcgagcgttacgccgtggccacctatgttgcaggtttgcaccaattcgcgccagctgtagatctctaccaagatttgcttctcgacgacgccccaaccaccctggcaaacgccgtctccgatgccatcgacgagggcctatccgcaggcccatacggcacctaccgtgaacctggacttgagtccgaatcagagccaggcggatctgtgcgcaacgatgccgccaagcttggcgagcgacttgcagcagcatttgattacgcacacctactagttttccacccccgtgattcccgccccgaggtccttggtcgactctccggcgctggctggagcgcggatgacaccgtgacattggctcagctggtgtcgttcctggcattccagctgcgtgttgcctacggcctgcgcaccctcaaaggtgaagacattcaggtgaaagctcctcgcctgagtattcctgaagcgaagtgggaactgtccaacaacggctttgagatctccacctatgaagaactcaaccgccctgaagcgtttgtgaaccactctttgggctggaagccatgggtaccaccagtagcaaaggcagatctcaccgaagaacagctggattctttgatccagcctgagcgcgctgatatgccatacttccgtctcttggcacgcgatcctgcagcattgaaggcgcgtaccctgaccgatctggatatcttcttcaacactgacggcgaaggcctaggacgtgcagagcgtgaactcggcgccaccgttacttcccgctacaacggctgcgtgtactgcgcatccgtgcacgcaggacgtgctcaggaagaatccggtcgagctgatgatgtcaacgcactgttggcaagcatcgactccgatctgggttctgaccagtggaatgtcatccgtgacgctgctcgcgcactgagctccacccctgctgctttcaaccagggatgcatcaccaagctgcgtggcgttggattcagcgacctgcagatcgtggacttgatcaactctgtggcgttcttcaactgggcgaaccgcctgatgttgtcactgggtgaacccgaagtgccaaagcgtttcctgtaaaacgcataaccccgaatacc

SEQ ID NO: 2012 - protein, 411 aa, Corynebacterium glutamicum
MSDLIDMLVGEDLPQLRDNRPQARDNAQKSFEALLEPVNPGTFSFGERYAVATYVAGLHQFAPAVDLYQDLLLDDAPTTLANAVSDAIDEGLSAGPYGTYREPGLESESEPGGSVRNDAAKLGERLAAAFDYAHLLVFHPRDSRPEVLGRLSGAGWSADDTVTLAQLVSFLAFQLRVAYGLRTLKGEDIQVKAPRLSIPEAKWELSNNGFEISTYEELNRPEAFVNHSLGWKPWVPPVAKADLTEEQLDSLIQPERADMPYFRLLARDPAALKARTLTDLDIFFNTDGEGLGRAERELGATVTSRYNGCVYCASVHAGRAQEESGRADDVNALLASIDSDLGSDQWNVIRDAARALSSTPAAFNQGCITKLRGVGFSDLQIVDLINSVAFFNWANRLMLSLGEPEVPKRFL

SEQ ID NO: 2013 - DNA, 732 bp, Corynebacterium glutamicum
  CDS (101)..(709): RXA01017
gaaatttgagggggcgctacccttagaaggtgcgcaatgacaccacgatagttcgcgcctagtgtggattgctagaaaactttaagaaagaggaaataatatggctcaaaaagtaaccttctggttcgataccacctgcccattctgctgggtcacctcccgctggattaaggaagtcgaacaagtccgcgatattgaaatccagtgggttccaatgagcctcgctgtcctaaacgaaggccgtgatctcccagaggattacaaggagcgcatgaaggctgcatggggaccagcacgcgttttcgcagctgtcgccaccgaccatgctgacaagctcggcgacctgtacaccgcaatgggtacccgcatccacaacgacggtcgcggaccaatcgaaggttccttcaatgatgtcatcgcagaggcacttgaagaggtcggcctagacgctgcacttggtgaagttgcagacaccaccgaatgggacgacgcacttcgcgcattccaccagaccgcaatggacgaggtcggcaacgatgtcggaaccccagtggtcaagctcggcgacaccgctttcttcggcccagtgctcacccgcatcccacgcggcgaggaagcaggagagatcttcgacgcttccttcaagctcgcaagctatccccacttctttgaaatcaagcgcagccgcactgagaacccacagttcgactaattaacgctgtctctgcttat

SEQ ID NO: 2014 - protein, 203 aa, Corynebacterium glutamicum
MAQKVTFWFDTTCPFCWVTSRWIKEVEQVRDIEIQWVPMSLAVLNEGRDLPEDYKERMKAAWGPARVFAAVATDHADKLGDLYTAMGTRIHNDGRGPIEGSFNDVIAEALEEVGLDAALGEVADTTEWDDALRAFHQTAMDEVGNDVGTPVVKLGDTAFFGPVLTRIPRGEEAGEIFDASFKLASYPHFFEIKRSRTENPQFD

SEQ ID NO: 2015 - DNA, 622 bp, Corynebacterium glutamicum
  CDS (101)..(622): RXA01021
cgagaggcttttttggctctaagccttttagtcgtgcgaacgaaatcttaagcagcctcggtgccaccgagatcgattggtcgctgtaaggtatctgattatgtccagttccgaaagctcgcgttccgaaggctcgcagccagcaccgtctgtacagcctgaacgccgtgctgattcaacgggggctcctgcggcagcttccaaggaagcttcccaacaaatggacgctgccggagttcttgagtgggccaggaccgctgtcgagcagctttctgaacgtcgtgcagagatcaatgcactgaatgtctttcctgttccagatgcagacactggatcaaacatgacctacaccatgacagctgcgttggatgaagcgctgaaactgggggagttgggtgatgtcgcaaggattactgaggctttggctgttggttctgtgcgtggagcccgaggaaattctggagtagtccttagtcaggtccttcgcgctattgctcaggcagctgctgacggggttattgatggccacacaatccaagaagcgctatccattgctcgctccctagttgatcgcgcaattacagatcctgtggagggcactgttgtcactgtgttgcgttct

SEQ ID NO: 2016 - protein, 174 aa, Corynebacterium glutamicum
MSSSESSRSEGSQPAPSVQPERRADSTGAPAAASKEASQQMDAAGVLEWARTAVEQLSERRAEINALNVFPVPDADTGSNMTYTMTAALDEALKLGELGDVARITEALAVGSVRGARGNSGVVLSQVLRAIAQAAADGVIDGHTIQEALSIARSLVDRAITDPVEGTVVTVLRS

SEQ ID NO: 2017 - DNA, 612 bp, Corynebacterium glutamicum
  CDS (101)..(589): RXA01029
atgggtggttgtcttaattaagggtgttgcgtgaaacacgcaaccggagaggagggtgaagtgtggggttccttgcgggcgtatgtccggggtgcttgctatgcttcaaacgatttcattcaagaaacttaatttattaacaactcttaaaagaaaaggagagctggtcatcatgatcactcgtcacgatgttccctacatcatcgctccgcctgtctacgcgatctttgcgagcctgatgaccacgccaccatggttttatcgaaccacctacaccattgacggtttcgattttaagatcagctgggtctacaccatcaccatctacatcagcctcatgatcctcattatcgggttctaccaagccaatatgcgcaaagcgtgcccttatgaggaagatcctttggtcgatatttggcacaaggtgtggagcactgcactctttatcctacctatcgttttatccatcgcggtgtactcactgatcacacagcgcgggtttgactggtatgtcatggtgtttattctccctgtaggcttgatgatcgcttatggattcttcaagccctgtgattgcgacaaacaccgttaaggtatacttgtccaagactt

SEQ ID NO: 2018 - protein, 163 aa, Corynebacterium glutamicum
MLQTISFKKLNLLTTLKRKGELVIMITRHDVPYIIAPPVYAIFASLMTTPPWFYRTTYTIDGFDFKISWVYTITIYISLMILIIGFYQANMRKACPYEEDPLVDIWHKVWSTALFILPIVLSIAVYSLITQRGFDWYVMVFILPVGLMIAYGFFKPCDCDKHR

SEQ ID NO: 2019 - DNA, 789 bp, Corynebacterium glutamicum
  CDS (101)..(766): RXA01031
cagctgaacttgatcattttgatgatctgccagtacagcgccaagaagatcttggcaccttagttgttatctctgctgttcacgcaagcgactctgcggcatgaaactgctgcaatacgcaggtggtgctgtctatgtcgatccagaagattctgcgcagtcccaagacctggatgccagcactgcacgtgatgttatcgacgctaccaacaccgccatgaccactattacctctcgccccaccatgattgtgcacctgcacaaggtgcgaaaagtcattgagattttatgcaaccctgcactcggcggtgaacctgtcaatatcgaccaggacgagaccggaaaacaggtgtacacacccaccccaacgcttgtcgcctatcgctttatctctgacaaagaaatcctgcttcattacctggcgcaggcgggtgtgcagggtgtggaggtttttgacgggtcgcctgacatgctgagccgttggaatgcgggacgcattccggtcttacttttgcagcctgcgtctgctggtcacggcttgaatttccagcacggcgggcatcgcttggtgtggtacaacctgcccgataataacgagcattatatgcaagcgaatgctcgtctacatcgcattggtcaaaagaatcccgtgaccattcaccgcattattaccgctgatacttatgatgcgaatatgccggcgattctggccggtaaagcaaatagacagcaacgtctcatcgacgccgtgcgccgtgatccagtctaagaccggcacgatcgcaccgt

SEQ ID NO: 2020 - protein, 222 aa, Corynebacterium glutamicum
MKLLQYAGGAVYVDPEDSAQSQDLDASTARDVIDATNTAMTTITSRPTMIVHLHKVRKVIEILCNPALGGEPVNIDQDETGKQVYTPTPTLVAYRFISDKEILLHYLAQAGVQGVEVFDGSPDMLSRWNAGRIPVLLLQPASAGHGLNFQHGGHRLVWYNLPDNNEHYMQANARLHRIGQKNPVTIHRIITADTYDANMPAILAGKANRQQRLIDAVRRDPV

SEQ ID NO: 2021 - DNA, 498 bp, Corynebacterium glutamicum
  CDS (101)..(475): RXA01032
agctaatcagcaccacctacaacaccacaaacacaccccaatcagcatgatcgtgccggttggggtgtgtcttatcccctaagaaagtgacacctttaccatgtcagaccacgacgccccacaaacaccgatccccaaggggttttggcagcagatcgaccaccaactcgatcgcctcggcacgcagcgcccagagaccttcgcagcactgcgtgacattttgcttgatcctgcctacaccgccattgttcatgaccgtaatcgctacggcgttgtcacctttgacaccaactcagccttcttctcaggctctggcggagacaacggcttagccgacgtactcattaactgtgattggcgcatgactgactaccgcgccgagtactactacgtcatgacacataaatacaccaaggaatcgtttacctatatcgagggcgacgtgaaacgcggcgacctcatcccgcctaataattaaggacaaccgccatgactcag

SEQ ID NO: 2022 - protein, 125 aa, Corynebacterium glutamicum
MSDHDAPQTPIPKGFWQQIDHQLDRLGTQRPETFAALRDILLDPAYTAIVHDRNRYGVVTFDTNSAFFSGSGGDNGLADVLINCDWRMTDYRAEYYYVMTHKYTKESFTYIEGDVKRGDLIPPNN

SEQ ID NO: 2023 - DNA, 459 bp, Corynebacterium glutamicum
  CDS (101)..(436): RXA01033
acgtcatgacacataaatacaccaaggaatcgtttacctatatcgagggcgacgtgaaacgcggcgacctcatcccgcctaataattaaggacaaccgccatgactcagatcgccatgtatctcgcaggacccatgacaggtatccctgaatacaactaccccaccttccatgcagcggctaataagttccgtgcagctggctacaccgtactctcccccgctgaagacgaatatgaatcccagctcactgcaccattgcctgagaacgctgagcacaaatacgaccactacttgcgtctcggtatcgaaaagctgctcaaggctgatgctgtccacatgcttcagggatggcagagtagcgccggtgccactcttgagcacgatattgcacagaaattgaggcttgccattacctatgaagaaccaccagcatcctaaggcgcctccggcatagcgta

SEQ ID NO: 2024 - protein, 112 aa, Corynebacterium glutamicum
MTQIAMYLAGPMTGIPEYNYPTFHAAANKFRAAGYTVLSPAEDEYESQLTAPLPENAEHKYDHYLRLGIEKLLKADAVHMLQGWQSSAGATLEHDIAQKLRLAITYEEPPAS

SEQ ID NO: 2025 - DNA, 477 bp, Corynebacterium glutamicum
  CDS (101)..(454): RXA01034
agaaagtatgtcaataactttgacataacctaaacacaataaattatgtagtattatgtgacactaagttattacatttattacatgattggttaggactatggacatggccattattcagtcggtcgaatacacatctgatgtctcacatgagcgcatcaccaatgtcgtctctgtaggcgtggtctacgagggtaaacagtatgtagtggaccttaatggtgacgacattgatactgagctcgatatgatcacgctcaaagaagtcatcaagattggtcgtgaggaatctgcacgccagatccgtcgtggatctgtagatgcagagctgcaccgtaaggcgcgtttgtgggctattgacaatgacatggccgttggtcaacgtggtatcgtgccacaggaaatcatcgacgcgtacaaagagtactgcgaaaaagaaggcattcctttcgaataagagccctgtggagaattgtt

SEQ ID NO: 2026 - protein, 118 aa, Corynebacterium glutamicum
MDMAIIQSVEYTSDVSHERITNVVSVGVVYEGKQYVVDLNGDDIDTELDMITLKEVIKIGREESARQIRRGSVDAELHRKARLWAIDNDMAVGQRGIVPQEIIDAYKEYCEKEGIPFE

SEQ ID NO: 2027 - DNA, 729 bp, Corynebacterium glutamicum
  CDS (101)..(706): RXA01035
ggcagtgatgcaccgcacttgagaaaaataaatcatctcaagaaacaaactaatacgttattattgtaatttaattagagaaaagaaagtgacttttaaagtgcttattcgcatcgccgagcatcaaggccggctccatgtccatagcccctactcaaaggcttttgccgcccgcgctcgaaagctcaacggtctctggtcacccgaaacgaagacctggcatttcagccccgataaagaacaaccggtgagacgcgcactcaaggatgtctacggctgggatgaattcaccacacccgagctatgcacggtgcagctcactgtgaccccagaggcagtgctcaacaaacacacactcaccatcgctggtgttacacttctgagccgtttacgcagaaattactcggtgtggttgggtgataatgtccgcatcatcagtggcaatttcccagaagcagcaggatcaccccagtaccccctcatcatgggtgtgaaggctcaacccgttgttatccatgtgcaggaattccctgtagatgctgtttcgactattcccccgcgatttaatcctattgttatcactgcaccgccgagcattgatattgctgctcttcgagctgaacgcgaacagctcacccgacgcatcagcgaaattgacaagaaaatcgcacgtgctgtgcatccaaccattcagactgaggctgcctaataatgatgcagactctcaag

SEQ ID NO: 2028 - protein, 202 aa, Corynebacterium glutamicum
VLIRIAEHQGRLHVHSPYSKAFAARARKLNGLWSPETKTWHFSPDKEQPVRRALKDVYGWDEFTTPELCTVQLTVTPEAVLNKHTLTIAGVTLLSRLRRNYSVWLGDNVRIISGNFPEAAGSPQYPLIMGVKAQPVVIHVQEFPVDAVSTIPPRFNPIVITAPPSIDIAALRAEREQLTRRISEIDKKIARAVHPTIQTEAA

SEQ ID NO: 2029 - DNA, 576 bp, Corynebacterium glutamicum
  CDS (101)..(553): RXA01036
ctgaggctgcctaataatgatgcagactctcaagcggaaaattccgctcatctcatgcaatgacctcaaagaagtgcagttactttttcttaaaggtcagatgcacacagtcggctacaagctagataccgatcttcgcaagctcactaataccgatgtgcttgatcttattaacgcgctcttcggcaccactgtgaccagcgcagatgacgaagcagcagatttcattgactctgatcctcagtttgcagtgctcgttgagctggcctaccacgactgtgcacgccgcgctgccatgggtctatccagggtacagcagctcatctatgacaatgcggctaaatcaacctactaccgcagcgtcgcagctagacatcgcaaacacatccgtgaactccacgagcaaacacagcgagatggtattcacttcgacaacccgttgtctcgtgcagtcatcaacgatctcagcatgtccatgaaccgtgctcgactaaaccgcatcgcttcatggaaatcagccggcgtacagcgctatctcaaccccactatctcttagaaccacacacaaccaagaaa

SEQ ID NO: 2030 - protein, 151 aa, Corynebacterium glutamicum
MHTVGYKLDTDLRKLTNTDVLDLINALFGTTVTSADDEAADFIDSDPQFAVLVELAYHDCARRAAMGLSRVQQLIYDNAAKSTYYRSVAARHRKHIRELHEQTQRDGIHFDNPLSRAVINDLSMSMNRARLNRIASWKSAGVQRYLNPTIS

SEQ ID NO: 2031 - DNA, 651 bp, Corynebacterium glutamicum
  CDS (101)..(628): RXA01037
cgactaaaccgcatcgcttcatggaaatcagccggcgtacagcgctatctcaaccccactatctcttagaaccacacacaaccaagaaagcagtcactacatgaccacctcatcaccccttaagtccaaaaattcccttaacggcgcgcagaccacatttgtccgcaattgtgttgcagacggcccaaccgaggtaaaagccaccattgatgcacgtggcggtatcgaacagctccgtgacaatgagatttcacagctccccgacaagctgtggttcaatagcgcaacctccgcatccaatgacgagttcaccaccgataacatccgacttgggttgctctacaacatggcactgaataaggcatcggctcatcgctatgagcttgctgcccgctggtacgccattgttagccctcagccatcgcaagaagctagccacaagcgcatcgcgtcctggcaccttacccagctgcacgcactggtgaccctatctcgcaccctaggggtcatcattcctggtgatgagatcgacgctctagcgcagtctatggagaatgctcgtcaagttggcaccgagaattggtccactgtcaccatgcgcacctacgtgaccaaccgcaaggcatcctaatgactcgcgatattttccac

SEQ ID NO: 2032 - protein, 176 aa, Corynebacterium glutamicum
MTTSSPLKSKNSLNGAQTTFVRNCVADGPTEVKATIDARGGIEQLRDNEISQLPDKLWFNSATSASNDEFTTDNIRLGLLYNMALNKASAHRYELAARWYAIVSPQPSQEASHKRIASWHLTQLHALVTLSRTLGVIIPGDEIDALAQSMENARQVGTENWSTVTMRTYVTNRKAS

SEQ ID NO: 2033 - DNA, 870 bp, Corynebacterium glutamicum
  CDS (101)..(847): RXA01038
acgctctagcgcagtctatggagaatgctcgtcaagttggcaccgagaattggtccactgtcaccatgcgcacctacgtgaccaaccgcaaggcatcctaatgactcgcgatattttccacgaggctgcaaaactcatcgcacacctggggtggagggacgcttttccagcactacagcgcactgacccagcgccaacacatgctgtgccgatcagggcctttgatctcaaggcgggcgccgtcatcaccgatgaaaatcgaagcaatgcttatatctatgacacccttgtcatcacgcagccatataagcacgagttacctcatcaaaacacccacccttttgagtgggccctggaacaaattgccacgcttgatccggcgttctcgatcaagctcgatcgctcagtgaccgtccctgaaattggactctacgcccgcacactgcatgaccttaatactcggcatcaagacttcttggcacagcgcaacgccatgttgcttgttgttgcccgtcgtggtgttgatccaaaaaatatcgcagacgtacttggtttaaccaccaatcagatacatcggattctcagtgctactccggctgattcccctactgatttaggcgttaaccccgccacaacaatgggtgatgtagtgaggtttatcaagaaacgtcgcaccactatgcaactacgcggcaccgctgtccgtgcactgctctatcacggccttacgccggcagtcatctcccgactaagcggcatgtcgcgtgcgggtgtcatcaacgcagccaaggcattccccaccaccatcaaccacaaggtcaagaaaagaaagcagcacttccatgtctaatctcggcacatactatgcag

SEQ ID NO: 2034 - protein, 249 aa, Corynebacterium glutamicum
MTRDIFHEAAKLIAHLGWRDAFPALQRTDPAPTHAVPIRAFDLKAGAVITDENRSNAYIYDTLVITQPYKHELPHQNTHPFEWALEQIATLDPAFSIKLDRSVTVPEIGLYARTLHDLNTRHQDFLAQRNAMLLVVARRGVDPKNIADVLGLTTNQIHRILSATPADSPTDLGVNPATTMGDVVRFIKKRRTTMQLRGTAVRALLYHGLTPAVISRLSGMSRAGVINAAKAFPTTINHKVKKRKQHFHV

SEQ ID NO: 2035 - DNA, 699 bp, Corynebacterium glutamicum
  CDS (101)..(676): RXA01039
aaacctatatgttaatagtaacagaaattaataagatactagagtttaatttgtagtatccagggaacattaaacgggtaaaggtaaaggacaaacgaacatggcgattaaaggcgcaatgccgaaaaatcgagtaccaggtgtggcagcaggtgcgtttattgctgctgccgttattgcaggtggatcaggcgtgacctttctcgcccaaggcggtggtgatgtcaatacagtggccgtcgtcgagccacaggacgaggtaaaaaatcaggtcgtgacagaaaccgaaattgtcacgaaggttcacgatccttcttcatctgacgccagtgatgctgacagcaacacaggcaccgccgaaggcgcagactcagatcacaaagaaccccgtgagcacgacagtgctcaagagccaacggctccgaccgaccccaccttgaccattaccggcaacggtgacacaccagtatcagcacttgatgctgtcgcaggacctgcccgtccaggtacggtgcacgtcattgagaatggcgaaaccttgtcctctatttctcaggacagtggtgtgccggttgggttgatcattgatcgcaacaagcttgttgatccagacctgatctatgcaggcacgccattggcgattccgactgagcaggaacttgctgctgcgatacagtaatgtagtggtagagggttaaa

SEQ ID NO: 2036 - protein, 192 aa, Corynebacterium glutamicum
MAIKGAMPKNRVPGVAAGAFIAAAVIAGGSGVTFLAQGGGDVNTVAVVEPQDEVKNQVVTETEIVTKVHDPSSSDASDADSNTGTAEGADSDHKEPREHDSAQEPTAPTDPTLTITGNGDTPVSALDAVAGPARPGTVHVIENGETLSSISQDSGVPVGLIIDRNKLVDPDLIYAGTPLAIPTEQELAAAIQ

SEQ ID NO: 2037 - DNA, 1026 bp, Corynebacterium glutamicum
  CDS (101)..(1003): RXA01040
taatttctgttactattaacatataggttttttaaagtttcgtctacataaacctgcaacagaaatcactacacccagttctcgaaaggctttttctctcatgacctacccagttacccctcaacctgtgcagccagcaccagtcgccgaaaagatcaaggcatcaagcctcaaagaaggcactcaggtatttatcaaaggtcgggttaattactcccgcatcgcaagctttattactggtaccgagcgcgaaaaccgtaatcgcgacaggcttcacccaatcgaattcgactacacctccctgactttgagccaccctgaaatcatctacggcaacccgcaacaaaagaccaatgaagaactcttccttgagcagcgaatctttgtcggcaagaagcgtcctgaagagggtccaaaattctccattgacaacaagagcaaccgtctaccacaggtttgggtgccatccaccaatgctgatggtacttatgagcagcttgaaggtctcgaaggtgagctcgacgcagggctcaacgtcattattctcatcgagttctataagccacgtacacaggttaatcgcggctcccgcctcaacgccgtgttcctgcaggagcccattcgttactacacccctggttacaatgcagataagctcgctgccctcggaatcgtacttaacgcaccgccaaaggacactattcagctcgttcctaatgaggtcgctgcaggacaagaccagtccaccaccgatgcatccggtctcccgcttccaggccagggatatagcgcacctgatcagccatatcaggcgcagcctcagtatcagcaggcaaccccagcggctgcacctcagcagtaccaggccccacagccccagtaccagcagtcagctccacaggcacaacctgcaccggcaccagttgcgcagttccagcaggcaagcgcctcaggcacctgctcagccagcacagcagcagtatcaggcaccacttcctgccggtaatcctcttgcagcaggtcagc

SEQ ID NO: 2038 - protein, 301 aa, Corynebacterium glutamicum
MTYPVTPQPVQPAPVAEKIKASSLKEGTQVFIKGRVNYSRIASFITGTERENRNRDRLHPIEFDYTSLTLSHPEIIYGNPQQKTNEELFLEQRIFVGKKRPEEGPKFSIDNKSNRLPQVWVPSTNADGTYEQLEGLEGELDAGLNVIILIEFYKPRTQVNRGSRLNAVFLQEPIRYYTPGYNADKLAALGIVLNAPPKDTIQLVPNEVAAGQDQSTTDASGLPLPGQGYSAPDQPYQAQPQYQQATPAAAPQQYQAPQPQYQQSAPQAQPAPAPVAQFQQASASGTCSASTAAVSGTTSCR

SEQ ID NO: 2039 - DNA, 276 bp, Corynebacterium glutamicum
  CDS (101)..(253): RXA01041
acagcaggcaatgcctacccaagccccacaaacaccggcacaaccagttcagccaccagcaccacaagccggttctgcatttaccgatgctccgggtgctgtgccacaggcaccagcagttcaggctgctcccgctgtagctcaggcgcctgtcgcgccagtagttgatatgaccgagccagcatccccatgggatcttccagctgcacctagtcagccagcgcagccagctcagggcatcacctacccggcataacaaccagcacaacccttaga

SEQ ID NO: 2040 - protein, 51 aa, Corynebacterium glutamicum
VPQAPAVQAAPAVAQAPVAPVVDMTEPASPWDLPAAPSQPAQPAQGITYPA

SEQ ID NO: 2041 - DNA, 1401 bp, Corynebacterium glutamicum
  CDS (101)..(1378): RXA01042
ttttttcaccagggtcgaggcgcggtctgtgtgcccacctcgacccacttttcgcccaccacttttcgtcaacctaccaacaacaaagcccaggtcacttatggtcaacccttttcacacgcttgataactcaccgtttgatccggtggcacagtttcctgcgttttatcacaacccgcttatcaatcacttgggccgccgtcgcgcctggacaatctcagacatcaacaaacgccccatcaatgtccaacagatgctgaccacggccacctacggtagccccgttattcatggtgcccgcattgaagacgcagcaacctccctacttaccctggatgaactgcgtacacagattcccaccgctgccaacaatgcgttttatctcgatgctgtccaagatggctgtcttattttagatattgaaaaaacctgtccccccgaggtcgcagccacactactcacgctctcccccaccgccttttacacagaggtgtccatgagtggtcgtggctatcacctcgttatgccgataccagagaattttgcagcgtttcctgccgtacacaacaaacccagtatcaaacaccccaagcgctggttcgaaattcttacctcacagtggatcaccttcacccgacaaccaatcccagagcatgttctccatcacagtgaatctgctaacacaagtgctgtgccatggttgaatgatcaaccacttacatgggaaaacgtctttgcagacttagctaaaactgttgcacccaacttaaaaaccggtgccggacttaccatcacacccaatgcactgatgccaccagatctcagcgatgctgagcgcattcgcgacgatgaagtcatcgactcgacctgtcgattatttgccgaacattactcgaaaacacttgcggacttctatgatgatgcatcccggttcgagttcagccaaattggtgtcattatcaatctactgctccccactatgaggatgcatcccaccacgatcagtctcgacaaacccatcaactccgatcacatcatcagacttctgttcgctgtcgctactcgcgtgatcactcaccgcagcaaacatgatgaggagcgatctggcgttccgtatctgatgtatcaggttatttcctgccttgacatgcgagaacaccccgacaatggcgactaccgtgtcgtaccctcccggcataatagagaccaacacagcaacaacccctcagctcatgtggtccaccaacaaccacaaccccagcccagcgcagcagattcgccacatcactaccgtgcactaccccaagaaaacacggtgtccgaacacagttttaaaatctataacccaccagccacaccccctctaggaggtgaaaattagatttattattaaaacacttg

SEQ ID NO: 2042 - protein, 426 aa, Corynebacterium glutamicum
MVNPFHTLDNSPFDPVAQFPAFYHNPLINHLGRRRAWTISDINKRPINVQQMLTTATYGSPVIHGARIEDAATSLLTLDELRTQIPTAANNAFYLDAVQDGCLILDIEKTCPPEVAATLLTLSPTAFYTEVSMSGRGYHLVMPIPENFAAFPAVHNKPSIKHPKRWFEILTSQWITFTRQPIPEHVLHHSESANTSAVPWLNDQPLTWENVFADLAKTVAPNLKTGAGLTITPNALMPPDLSDAERIRDDEVIDSTCRLFAEHYSKTLADFYDDASRFEFSQIGVIINLLLPTMRMHPTTISLDKPINSDHIIRLLFAVATRVITHRSKHDEERSGVPYLMYQVISCLDMREHPDNGDYRVVPSRHNRDQHSNNPSAHVVHQQPQPQPSAADSPHHYRALPQENTVSEHSFKIYNPPATPPLGGEN

SEQ ID NO: 2043 - DNA, 696 bp, Corynebacterium glutamicum
  CDS (101)..(673): RXA01043
tactaggtatagcaacggattaaataatcactataattaattctttccgtactcattttaatcactacctattcaccacttgaacggagcgtttttcgccatgttgaaattccgcatcatctccacagtcactactggatctcagccaactccacgaaaaagctggagccaccccgacaccactctcctggtcaccatggtcactgcaccatcgctgtgctcagccatcaacgtgtggaacgcaactgagcgtattcccgctcaaaaaatccttaatgtcgaagaagtacacgttcttggtgagtgcagcgacgccatcatctctacgtcactaaccaaaaaggacaatccgcacgcacttgtgcccgatgatttcgaccaaatcggcgatgtgtttggctatgcgcaagacaatgtagctgtttttgatgtcattgtcgcagcactgggcggtgctggttatggcctgctacccggactggtcatgcaccacattgatgagcacaccgttgcacttgtctttgatactgattcccctactgggacgcatatcctcggtgagcgctgcgtgtactccgacatcattcacatgactgacgataagtctgcccgtggctggggtgcagtcattgccatagcacgagccatcatcctcaaagtcgaacagatcatgtagtaccccaccatgactcactt

SEQ ID NO: 2044 - protein, 191 aa, Corynebacterium glutamicum
MLKFRIISTVTTGSQPTPRKSWSHPDTTLLVTMVTAPSLCSAINVWNATERIPAQKILNVEEVHVLGECSDAIISTSLTKKDNPHALVPDDFDQIGDVFGYAQDNVAVFDVIVAALGGAGYGLLPGLVMHHIDEHTVALVFDTDSPTGTHILGERCVYSDIIHMTDDKSARGWGAVIAIARAIILKVEQIM

SEQ ID NO: 2045 - DNA, 1380 bp, Corynebacterium glutamicum
  CDS (101)..(1357): RXA01044
cagatagccactacctacacgcatctgttgtgctgaaacaacagcgcgacactcactcttctcattactcaacaacttacttttaaggactacataacttatgtctctctaccttgacgacactttgtctcgcatcgttgaacttgatctcaaagacacccgcattgtgccgtttcttgctggtgaaccaggtatcggtaaaacctcattcatctacggcatcggcgaacgtgcaggctacaaagtcttcagtatctcggttaacacccttgccgataagggtgacctcacgggcgctcgcaccctgcaggaccctgccgatggcaagtggaagcagatgtttttcccgcacgcgaccttcgtcgaagcaaatgactatgcactagcaaacccaaacgaaacggtcgtcattcttctcgatgagattaaccgaactgattcggatgtcacctctgcctcgatgactatctctactgagcgtcgcgttggtaccaccgatctagcacccaatgtccgccttgctgtcaccggaaacctcaccggtaatgtcacccaccttgattcagcatctctgaccaggttctccctctatgaggtcaagccatccgcagagaccttcatgaacatcatgggcggccgcctcaacaagtacatccgtaccgtgctgaccaaatacccggaatacatcttcatgaagccaactactgctactgctcttattaccactggcgatgatgatgacgaccatacaaccaatgcgaagcaaatgatggacttcaacgctgtgctcggttcagaccaagacatggttcaatttaccgcacctagaactatcgaaggtttgtccgtctggctcaacaacgccgatgatgactttcttcgtctacttctacaagaaaaggtggatggtcttgctcgatccatgagcttgctgcaggctacgctcgaatctcacaccggcgataccgcttttaccgcagaagtcctcagcgaaatgaccaatgatctgctgagctccgcatcgcaagctcctagtggtccaatcaaaccatttgtctacgaccgactcgctgctgcaccaagcaatactgtactggaacaagaggttcacacactcagtctcaatgaccgcgccgatgtcttgttgtttgccctccatgacactgtaaacaacgctgcaccaagcatcatcgctcaccttgcatctgaaggcgtacttgatgaactgcccaaagacagaatcagcaaaattgtttcactcggtcctgtaccaacggcaaactatcacgccttgaccagacaggatacaacgttgactcgaaatctcggtcccgctgtcttgggcttcttggaaagttaaagcaatttcctaagtacctt

SEQ ID NO: 2046 - protein, 419 aa, Corynebacterium glutamicum
MSLYLDDTLSRIVELDLKDTRIVPFLAGEPGIGKTSFIYGIGERAGYKVFSISVNTLADKGDLTGARTLQDPADGKWKQMFFPHATFVEANDYALANPNETVVILLDEINRTDSDVTSASMTISTERRVGTTDLAPNVRLAVTGNLTGNVTHLDSASLTRFSLYEVKPSAETFMNIMGGRLNKYIRTVLTKYPEYIFMKPTTATALITTGDDDDDHTTNAKQMMDFNAVLGSDQDMVQFTAPRTIEGLSVWLNNADDDFLRLLLQEKVDGLARSMSLLQATLESHTGDTAFTAEVLSEMTNDLLSSASQAPSGPIKPFVYDRLAAAPSNTVLEQEVHTLSLNDRADVLLFALHDTVNNAAPSIIAHLASEGVLDELPKDRISKIVSLGPVPTANYHALTRQDTTLTRNLGPAVLGFLES

SEQ ID NO: 2047 - DNA, 1947 bp, Corynebacterium glutamicum
  CDS (101)..(1924): RXA01045
cagctgaggtagtcatctgtctacctgcgtggagtagacactaaatcctgtccacgcacccttacccttcttgacactagtaattgaaagcgatcccctcatggttaccttcagcgtcgcaaatcacgcgcctcatacttttagcccattcgatattgaaccaccactcaccggtaacgccaccaccgacgaacatggttacgaacacacctcagtgctagaaaaactagcctccaaccacctgttcaatccaatcaatccgcaacacccagtcactatcacagccaccgaaaacggatcaaccgttgatcttgatgcagcagcactagcacaacatcttgctctagcgattaccccagactcaatgctggcaaatcatcaaggctacaaccgtgacatgatgggtctactttcgcagcttactaaccatgttggctttgatcgccgattcattgttgaccaactctttatctcccaagtgctcaaagcgaatcgtctaccagcaccggcaaacaacgttatttacaccgtgcccaatgacgttatcccatctgctaaagacatcttgtccaccactgcaaaaatgaacaatccactgacagttactgcaagtgccccaattactgttgacgacattcacacagcctatgaggtatttttcgcttctcttgcctcagtgtttttcccttatacctacggtgcggtattccttaacaacgcagaattcgttgagtttgttgattaccttattaacgaagcaacaacactgcactcggcatcactcatctccaacaacacctttaataggttccaatcaatgcgtaacatctccattgataatctcaccgccgagtttctcttacgcaaaaatgaagcagagacaactgatgattattcattcccccgcgtacttgtttccctgctgcattcttgggtgaaactcaatcacgatgatgctcgtgctaacaatgatgcacccacctgtgcactagcaccgtttagtgtggctcaatggatcatgccggagaccattgtgtttattaatgctgaagctcatgctcatgcatcctcccaggacattgagaagaaatggaaggaaattaatgcggcgttaacagggtctattcgtattatgtcgccaaatgcaatttccaagctgcaatctgctcagcatctcgggatgcaagcacaaatgcaggccatgcgtgctcgaaaagatcaccacaacatgcagaagcgttcctcacaagaaaacgacttttccaaggcactcccctcaccacagactatcgtgctttctgtcgcagaggttctgcgcaaactcactcacgtacgccaatcgcacaaccctcagaaataccagaagaagtctctgaccagagcttctcgccgacacccggataaccctaatgtccctggcaccattaagagcaagctcttctaccctgacctgcatgtttatgtagatacttctggttcgattagtgaagaaagctaccgcaactctgtggttctgctcatgcagcttgccaccaaactggacatcaacctctatttctccaccttctctcacgtgctctccgaagaagtactattgccgaccaagggtaaaacaccacagcaattggcagctcttatttcggccatcccaaaggtctctggcggtactgactatcaccagatttgggattacatccagatcaatccgcagcgccaagaacgcatgaatcttgtgttaactgacttcggattcatgccgaatcgcggcttaaacatcgaccacccaagttctattttctacgtcccaatcctgcctgactacggcagctggtcaatggttcgaagagatatgtctcatttcgcaaatgaaatggttgacttcgacccctatatccacagccgactactcggcgtacacggaaaatagcagctgatccatctagggtc

SEQ ID NO: 2048 - protein, 608 aa, Corynebacterium glutamicum
MVTFSVANHAPHTFSPFDIEPPLTGNATTDEHGYEHTSVLEKLASNHLFNPINPQHPVTITATENGSTVDLDAAALAQHLALAITPDSMLANHQGYNRDMMGLLSQLTNHVGFDRRFIVDQLFISQVLKANRLPAPANNVIYTVPNDVIPSAKDILSTTAKMNNPLTVTASAPITVDDIHTAYEVFFASLASVFFPYTYGAVFLNNAEFVEFVDYLINEATTLHSASLISNNTFNRFQSMRNISIDNLTAEFLLRKNEAETTDDYSFPRVLVSLLHSWVKLNHDDARANNDAPTCALAPFSVAQWIMPETIVFINAEAHAHASSQDIEKKWKEINAALTGSIRIMSPNAISKLQSAQHLGMQAQMQAMRARKDHHNMQKRSSQENDFSKALPSPQTIVLSVAEVLRKLTHVRQSHNPQKYQKKSLTRASRRHPDNPNVPGTIKSKLFYPDLHVYVDTSGSISEESYRNSVVLLMQLATKLDINLYFSTFSHVLSEEVLLPTKGKTPQQLAALISAIPKVSGGTDYHQIWDYIQINPQRQERMNLVLTDFGFMPNRGLNIDHPSSIFYVPILPDYGSWSMVRRDMSHFANEMVDFDPYIHSRLLGVHGK

SEQ ID NO: 2049 - DNA, 1902 bp, Corynebacterium glutamicum
  CDS (101)..(1879): RXA01046
tagcgatcctaggcaaaatgcaccagctaaccccaccgctcaaccgccatctgcccccacctcacactcatcacagcagggtctccctccgggcgccattatgatcccttttccagggcaaccgcagcagcaaagcgcacccaatgacgagacccgtttcatcgaccttaacgaacgtcataaagatgatgaaccagccctgtttcgcgatgatgttattgatcaaactctcgctattttgatcagtaaaaataagcccaatgcgctactcgttgggcctgccggtacaggtaaatcccgtatcgcagaagatattgcgcgccgccttgccaatgatgacgtatctattcccgatcagcttgtcggccaccgtattcttgatgtctccattgcagagcttgttgctggtgctggcgttgttggtcagctcaagaaacgcattctggatctcatcaagtatgcgaccgacccgagtaacaaagtcattatctttattgacgagattcaccaaattgctggtgatcagtccagtcacagtggatcgcaagccaaagttgctcagattctcaaaccctatcttgcccgtggtgaccttcgtgttattggtgccaccaccacccaggaagctcgtgacttcgatcatgatccagccctcaaacgccgttttagcagagtaaatgtcgatgaatttgatcgagatcaaacgctcactattcttcatgctgcacgtgatggttacctcaaacatttcaacaacgctgtcacggtatctgacgacgtactgggctatgtctacacctactcgcagcaattcaacccaggcaatacagcacaacctgatgcagcactgacgctgtttgataaggcgttggcttccctaactatggagaaacagcgtctgatcaacaaccatgtcattgcgccgtcgctcaagttccctgtgtcagaaaggcacatccataacaccgctcgcaaacttgcctttggctctcaagtgccagcctccatcaatactgatgatgctcgtgacaaactcgaaacgttgtttggtcaagatcatattattgagccagtactcaccgctatcaagcgtgaacagcttggtattttccctcgcaccaaaccattgagctgggtgtttgctggttcatctggtgtgggtaaaacagaaatggcgcgtattctctctcgcgccattaatggcggcgatcccatcattatcaatggtcccgaatacattagtcctgagtccattactggccttatcggatcatccgatggctatatcggctctaattctaagcgtgctaaaccactcgacccgctgatttctaatccgcgtcaggtgattgtgctcgatgaatttgagaagtctcaccctcatttccagcaattgttcatggcagctcttgatacaggcactatggcgatggctaatggcacgacattgaatttctctcaggccattatcattgccaccaccaatgcagcccgcgacaaaatcggtcgtgacagctttggattcgattcagataattcaggtgtcctcggttctgctcaagcagcaactgatccgcgtgcacaggaacgcctcaagtcactgatgtccaaggatttcctgttgaactgctcaaccgtttccagaatatctttgccttcaaccgcattgatgcaggcacctaccgtgagattctggacaatctctaccagcgtcgccgtgacgccgtgctgcttagccaccccgcattacgcagcacagatccctgcagatattgattcagacactcttgatcagctggtggaaaccacctttatctcagattttggtgcacgtcctgctgcacgcaccatcgaagaccacatcgcatccttgctgatgtgaccaaccttttaggagtacat

SEQ ID NO: 2050 - protein, 593 aa, Corynebacterium glutamicum
MIPFPGQPQQQSAPNDETRFIDLNERHKDDEPALFRDDVIDQTLAILISKNKPNALLVGPAGTGKSRIAEDIARRLANDDVSIPDQLVGHRILDVSIAELVAGAGVVGQLKKRILDLIKYATDPSNKVIIFIDEIHQIAGDQSSHSGSQAKVAQILKPYLARGDLRVIGATTTQEARDFDHDPALKRRFSRVNVDEFDRDQTLTILHAARDGYLKHFNNAVTVSDDVLGYVYTYSQQFNPGNTAQPDAALTLFDKALASLTMEKQRLINNHVIAPSLKFPVSERHIHNTARKLAFGSQVPASINTDDARDKLETLFGQDHIIEPVLTAIKREQLGIFPRTKPLSWVFAGSSGVGKTEMARILSRAINGGDPIIINGPEYISPESITGLIGSSDGYIGSNSKRAKPLDPLISNPRQVIVLDEFEKSHPHFQQLFMAALDTGTMAMANGTTLNFSQAIIIATTNAARDKIGRDSFGFDSDNSGVLGSAQAATDPRAQERLKSLMSKDFLLNCSTVSRISLPSTALMQAPTVRFWTISTSVAVTPCCLATPHYAAQIPADIDSDTLDQLVETTFISDFGARPAARTIEDHIASLLM

SEQ ID NO: 2051 - DNA, 597 bp, Corynebacterium glutamicum
  CDS (101)..(574): RXA01047
aaccacctttatctcagattttggtgcacgtcctgctgcacgcaccatcgaagaccacatcgcatccttgctgatgtgaccaaccttttaggagtacatcatgattgataccactgctaacagcacctcaggcaccctacctacactcactgctgaccaagctgcgtttatcaccggtttttgcgaggctgctatcttcacagccaccgtcacaatagataacgaacctatatttcttgatgaagcgttcttcttaggtcaagaaacctataccgacattctcatgaatcaactccgcaccaatgaagccattgttaaagactgtctcgacttcttccttgacaactacaccacaatgaacaagctcattgttgatggtctatgcccagattgggagcaccacggccatgatttcctactcacccgtgaccatcatggtgccggattctgggatcgtggctacgacgaatacggtgcccaactcaccgacaatgccgaaaaatattcagaaaactgtctcaatttctggattgagcctgatagtgaccctctcattatcaacttcgagtaccactaacaccccttgaccttattttt

SEQ ID NO: 2052 - protein, 158 aa, Corynebacterium glutamicum
MIDTTANSTSGTLPTLTADQAAFITGFCEAAIFTATVTIDNEPIFLDEAFFLGQETYTDILMNQLRTNEAIVKDCLDFFLDNYTTMNKLIVDGLCPDWEHHGHDFLLTRDHHGAGFWDRGYDEYGAQLTDNAEKYSENCLNFWIEPDSDPLIINFEYH

SEQ ID NO: 2053 - DNA, 444 bp, Corynebacterium glutamicum
  CDS (101)..(421): RXA01058
ctcccgtaataggggtaattttgcaattaactgcgcttaaagtaagaaacattgctaatctttatctgggtaattaacaatcgattttaaggatattctcatgcgtaaacttcgtactgcttccgttgcactgctgaccgcaggtgcacttgcactgaccgctactcctgcaatggctcagtccaccaccggttcttctgcatcttctcaggttggcgacgcactcggtgctagcgactacgagcgcgacatctggggttcctctaaggacttcgacgatgtaaccccattcggttccgcttggtacggctacaccctggccgcaaccgcagttgctatctccggtcttgtgtacgcaaaccttcctgcaatcgagcaggctgctgcacaggccggcatcaagctggagatcccacgctactaattgccactgcaatcttaaat

SEQ ID NO: 2054 - protein, 107 aa, Corynebacterium glutamicum
MRKLRTASVALLTAGALALTATPAMAQSTTGSSASSQVGDALGASDYERDIWGSSKDFDDVTPFGSAWYGYTLAATAVAISGLVYANLPAIEQAAAQAGIKLEIPRY

SEQ ID NO: 2055 - DNA, 453 bp, Corynebacterium glutamicum
  CDS (101)..(430): RXA01063
actttcttgtagaggtctgggtagtggataagttaatcaactatgaaatagactaacttaatcattaacattaatggattttcggagaatagggatagacatggcagacgagaaaaaggttcatgtacgtgccacactgcgctttgattcagacacccaccagcgggcaatttattgggcagatcgaaaaggtatctcgctgagcgcgtatgcagaagaggcgatcagagagaagattgatcgtgataacggtgtgcacgttattccgaattcactgttggataaccgcatgaaccaaatcattgatcagctcagctcgtttggtcgtgagttggcgaacaacacgacagttgtaactagtggtttcaacaccattatcggtatgactcgtggcgactcgtatctctctgatgatctcgatgacctgggttaaacccgatgaacgagcaggaa

SEQ ID NO: 2056 - protein, 110 aa, Corynebacterium glutamicum
MADEKKVHVRATLRFDSDTHQRAIYWADRKGISLSAYAEEAIREKIDRDNGVHVIPNSLLDNRMNQIIDQLSSFGRELANNTTVVTSGFNTIIGMTRGDSYLSDDLDDLG

SEQ ID NO: 2057 - DNA, 849 bp, Corynebacterium glutamicum
  CDS (101)..(826): RXA01066
aaacgtattccttgacctgcgcatcaaggtgctgaagaactggcaatccgatccaaaggctttgaaccgcctgggcttctagctttaagggggtgagttcatgcgtagggacagttttcgggaccgcgcgctagtagtcaaaacttatgattttggcgaagccgaccgcattattgtgctgctcacccgagaccacggcatcgtgcgcggagttgccaaaggagtacgccgatccaaatcccggtttgggtcaaggctgcagctttttgtggaactcgacgtgcagctctacccaggtagaaaactgtccaccatctctggcgcggacaccgtcggctactacgcatcaggcatcatcgaggacttcactcggtattcctgtgcgtccgccatcctggaaatcgccacccacatcgcaggactggaaaacgatccgcacctgtttgaagaaaccacccgggcgttgaaaaacattcaggactccccagaacccatcctcaacctagacgagttcatgctccgcgccatgaaccacgccggctgggcaccaagccttttcgactgcgcagcctgcggccgaccaggacctcacaacgcattccacccaggcgtcggcggggcagtgtgcctgtactgccgaccgccgggaagcgccgaagtcccaccagaagcactacacatgatgtggttggtcgccaacggccaagcagcccgcattccccgggaacacccagagcagcaaaccaccattcaccaactgacaaccgcgcatctgcagtggcatattgaaagaaagctgcccacgctggcggtgctggatcaggcctagtgcttaggcttaggcgtccg

SEQ ID NO: 2058 - protein, 242 aa, Corynebacterium glutamicum
MRRDSFRDRALVVKTYDFGEADRIIVLLTRDHGIVRGVAKGVRRSKSRFGSRLQLFVELDVQLYPGRKLSTISGADTVGYYASGIIEDFTRYSCASAILEIATHIAGLENDPHLFEETTRALKNIQDSPEPILNLDEFMLRAMNHAGWAPSLFDCAACGRPGPHNAFHPGVGGAVCLYCRPPGSAEVPPEALHMMWLVANGQAARIPREHPEQQTTIHQLTTAHLQWHIERKLPTLAVLDQA

SEQ ID NO: 2059 - DNA, 1194 bp, Corynebacterium glutamicum
  CDS (101)..(1171): RXA01068
tggtctaccaagacaagctgttccctgatttcacgcagcaagatctgtacgacgcggtcctggaatacgccaagcgggatcgcagattcggaagcgcataatgcccaccaaccagccgacgccagcccaaatcaaacgctggcgcggatacctggccaatgagcaagcagaggccgcagcctaccgcgacctggccaaacgacgcgaaggcgaagagcgagacatcctcctagcgctcgccgacgctgaacaccgacacgccgcttactgggtggaaaagctcggccctgatgccgaaaacccaccaaaagccgacgtcaaaacccgcctgctcggttttctagcacgccgattcggctccgtgttcaccctggcactcatgcagtccgccgaaacgcgcagcccctacgacgacgatgccgacgcctcccgccaaatcagcgccgacgaacgcatccacgccgaagtcgttcgaggcctagccagccgcggcagagaacgcatgagcggcaacttccgtgccgccgtattcggaatcaacgacggcctggtctccaacgtcgccctcgtcatgggtgtcatggccaccggcgtgcccgcccaaattgttctcatcaccggcatttccggtctgctctccggcgcgctatccatggccgccggcgaatacatctcagtgcgctcccaaacagagcttctcgacgcctccctcccagaccccaaagcccgcgaagccctccacgccctcgacgtcgaatccaacgaactggaactcgtctaccgagcccgcggaatgagcgaagacgaagcgcgggcaaaagcgtcacaagttttccaaagaatcagcgaccaaaaacgcatcagcgacaacgtcctcggcagcaccgaaatccaaagcgccggctccgctcgttcggccgccacattcagcttcctgtcctttgccatcggcgcattcctcccgatcgtcccatacgtcttcggcatggaaggcctcgccggggcagtggtgtccctagtcctcgtcggactatcactgatggcaacgggcgcgaccaccggcctgctatcgggaaagccaccgggaatccgcgcggtgcgtcagctgtcgatcggctacggcgcggcgctggtcacctacgtgctcggcctcctgttcggcatgatcctttaaaagctcttgcttctcgacgt

SEQ ID NO: 2060 - protein, 357 aa, Corynebacterium glutamicum
MPTNQPTPAQIKRWRGYLANEQAEAAAYRDLAKRREGEERDILLALADAEHRHAAYWVEKLGPDAENPPKADVKTRLLGFLARRFGSVFTLALMQSAETRSPYDDDADASRQISADERIHAEVVRGLASRGRERMSGNFRAAVFGINDGLVSNVALVMGVMATGVPAQIVLITGISGLLSGALSMAAGEYISVRSQTELLDASLPDPKAREALHALDVESNELELVYRARGMSEDEARAKASQVFQRISDQKRISDNVLGSTEIQSAGSARSAATFSFLSFAIGAFLPIVPYVFGMEGLAGAVVSLVLVGLSLMATGATTGLLSGKPPGIRAVRQLSIGYGAALVTYVLGLLFGMIL

SEQ ID NO: 2061 - DNA, 828 bp, Corynebacterium glutamicum
  CDS (101)..(805): RXA01074
cgaatgaaatcactgggcgggagttcaccctcggcgaggagcctgagcgctactagctttgccacatttcactaaacgccccgcacaaccccaagcagccttggcggaagccgcaggtctacgctggctcgccgaagcatcttcagctgtggcacaggttgttagcgccgacgcagagcagatcacgactgttggcgtcgaaacgcaattgcccacacccgatgcggccttcaaggccggcgaagagctcgcccgcatccaccttgccggcgccccagcgttcggctgtccaccagcgggctgggcggggttaaactacatcggcacccagggacaagcatgcttatcgacgcccacctggggtgttttttactcccagcaacgcgtactcccgtttgcgcgccgggcacgcaggcgaaatcacctcaccgagcacgcactctgggtcgtggaagccgcttgtgatttgattagcgaacttcccgatgacgttccccccgccagaatccacggcgacttgtggtttggcaacctactttttggcacagacgggcctgtgtttattgaccccgcagctcacggcggtcatcccgaaactgatctcgcgatgcttgatgtatttggcgcaccctatctcgatgaaatccgggaaggttatctgtctatcaacccgctgccagacgggtggcgtgaacgcacccccatgcaccaactccaccctttggccgtacatgcggcgtctcatgggccaagctacggcgtggaactactccacgccgccaaagcgacactcaaactgttggattaacgccaccaattttcctgcgg

SEQ ID NO: 2062 - protein, 235 aa, Corynebacterium glutamicum
LAEAAGLRWLAEASSAVAQVVSADAEQITTVGVETQLPTPDAAFKAGEELARIHLAGAPAFGCPPAGWAGLNYIGTQGQACLSTPTWGVFYSQQRVLPFARRARRRNHLTEHALWVVEAACDLISELPDDVPPARIHGDLWFGNLLFGTDGPVFIDPAAHGGHPETDLAMLDVFGAPYLDEIREGYLSINPLPDGWRERTPMHQLHPLAVHAASHGPSYGVELLHAAKATLKLLD

SEQ ID NO: 2063 - DNA, 1143 bp, Corynebacterium glutamicum
  CDS (101)..(1120): RXA01076
tcctcccattaagcaccttgtcttccggaagcttccaccccaaattccaaaccccaaattccatgccccggatggacatttttcattacactcgggggctatgactccagctcacatattttctgaaggtccaatcaatagtgttgttctcagccaggatgaggatggaaatttcaccacctcctaccaggacacgttctctgatccatcatttttgggggaaggtgacgttctaattgaggttggttggtccagcttgaattacaaggacgcaatggctctgaagggtgataagggagtggtgcgtactgtgccactgattccaggtatcgatgtggtgggcactgtgatcgagagcgctgatcctcgctttggtcgtggtgatgaagtggtgctgaatggcgctggtttgggggagaaccggcatggaggtttcacgcagcggctgaaagtgccgtctgaaccgttgctgcatattccatttaacttctccgcgcagcaggtgggtgcgttgggtactgcaggtttcacggctgcgctatcggtgaatgctctggtcgatcaaggtatcaaaccggaggatggggagattctggtaactggttcgactggtggtgtgggttcgattgcacttcacctgctgaataagttgggatatacgacggtcgcggtgacggggcgtcgagaagcgcatgccgaatacctgaccagcctgggcgcaagcgacatcattgatcgcgcggagctttctgaaaagggccggccgctgcagaaggggcgttgggcgggtgtagtggattcagtgggatcccacacacttgtcaatgcgattgctcagacaaaatggggcggaattgtcacggcgtgtggcatggctcaggggccggatctgccgggaacggtgttgccgtttattcttcgtggcgtgcatttggttggcattaactctgtcgatgcaccccgtgagctgcgtcgacgtgcgtgggcgttgctgtccgagcatcttgataccgcggtgctagatgatatgaccactgtgattgatgtcaaggatgttgctcaagctggcgaagatttgatggctggcaagcttcacggacgtaccgcggtgcgtgttcattagcaggtcaagcgcgtaattga

SEQ ID NO: 2064 - protein, 340 aa, Corynebacterium glutamicum
MTPAHIFSEGPINSVVLSQDEDGNFTTSYQDTFSDPSFLGEGDVLIEVGWSSLNYKDAMALKGDKGVVRTVPLIPGIDVVGTVIESADPRFGRGDEVVLNGAGLGENRHGGFTQRLKVPSEPLLHIPFNFSAQQVGALGTAGFTAALSVNALVDQGIKPEDGEILVTGSTGGVGSIALHLLNKLGYTTVAVTGRREAHAEYLTSLGASDIIDRAELSEKGRPLQKGRWAGVVDSVGSHTLVNAIAQTKWGGIVTACGMAQGPDLPGTVLPFILRGVHLVGINSVDAPRELRRRAWALLSEHLDTAVLDDMTTVIDVKDVAQAGEDLMAGKLHGRTAVRVH

SEQ ID NO: 2065 - DNA, 957 bp, Corynebacterium glutamicum
  CDS (101)..(934): RXA01078
atcattcacgagctcgatagccgacaggtttctgaactcacagaagccctggccaaagtctccaccacccgcagctaaaactttttgaaaggagctcatcatgagcaacgcagtaccccacaacgtttccttcaactttgttccccgcgcttaccgtccagaaaagccccgcacattcggcatgacagaaattcgtgcaccgtactactccactttcggcacccgacacctccaggatgtcttcgatgttgcaggccagtgggtggacggcatcaaatgggcaggcggttccttctccctggtgccgaccgaacaggtgcgtgcttttagcgacatcgcccatgaaaacaatgcctatgtgtcttccggtggctggattgaaactgtgcttcgctacggcgacgacgcagttgatcattacttaaaggaagccaaggaagtcggcttcgatgttattgagatttccaccggattcatcatgctcaacacttcaggtcttcagcgcctggtagaaaaagtggtcaaggcaggcctcaaagcaaaacctgaactaggactacagattggttccggaggcgactctggtgaggctgaacttgcagccgaaggaaagaaagacattggcgatctggttgaccgcggtaaaaaagctctcgacgccggcgcatccatcatcatgatcgaatccgaaggcatcaccgaaaacgtcaccgaatgggatacaggcgctgccgcgtccatcatcaatggactgggattagaaaacgtcatgttcgaagccgccgacggccccgtctttgagtggtatgtcaaaaactacggcaacgaatgcaacctgttcgtcgaccacagtcaaattctgcaacttgaagggctgcgccaaaacatctggggcaacaagagcacctggggacgagtaatcaaccctgcgccttaaataccaggtcagggagggca

SEQ ID NO: 2066 - protein, 278 aa, Corynebacterium glutamicum
MSNAVPHNVSFNFVPRAYRPEKPRTFGMTEIRAPYYSTFGTRHLQDVFDVAGQWVDGIKWAGGSFSLVPTEQVRAFSDIAHENNAYVSSGGWIETVLRYGDDAVDHYLKEAKEVGFDVIEISTGFIMLNTSGLQRLVEKVVKAGLKAKPELGLQIGSGGDSGEAELAAEGKKDIGDLVDRGKKALDAGASIIMIESEGITENVTEWDTGAAASIINGLGLENVMFEAADGPVFEWYVKNYGNECNLFVDHSQILQLEGLRQNIWGNKSTWGRVINPAP

SEQ ID NO: 2067 - DNA, 399 bp, Corynebacterium glutamicum
  CDS (101)..(376): RXA01083
gtcgacatactggcacgcaagatctgtgtacccggcccacgtgcctaaaactaggtgagcgagaccttcgagcagttcctcgaaggagagtgatccacctatgtttccgcgaattccgctggcaatgtgtgctgtcgcagcaatccctgctgttgtgctcaggttttctgagctgtcggcgtcacctgtggcgaccatgctgatttttggtaccgcagtggttgctgcctcttttgtgttggcgtgggcagctgaagctgtgcgcaaagatatttctggtgcgttggcagtggccttgcttgcgttagttgcagtgcttcctgaatatgcttctgaaacggttgtcgagcacacttatcaaacatcggcggcgaattaagaaggtgaacagttgacgca

SEQ ID NO: 2068 - protein, 92 aa, Corynebacterium glutamicum
MFPRIPLAMCAVAAIPAVVLRFSELSASPVATMLIFGTAVVAASFVLAWAAEAVRKDISGALAVALLALVAVLPEYASETVVEHTYQTSAAN

SEQ ID NO: 2069 - DNA, 1305 bp, Corynebacterium glutamicum
  CDS (101)..(1282): RXA01088
tgccttgagtctaattctcccgcccgtgcgatgggtttaagctggactgataaaccttttgtgaaccgaattttttaactgatttgaagaagcgagaataatgggactgtggatcgatgcaaccgctggcgttgcaggggatatgttgctgggagcactcattgatgcaggtgcagaactagaaaaaatccaacaggttgtggaagcagtcatccccggtgacgtgctcttgcgcaccgaagaggtagtgcgccaaggccaacgaggcatcaagctgcatgtggacgcacaacatgaacaccatcatcaccgccacttaagcaccattaaagaactgcttgtcaatgctgacatccctgaacaaaccaagcaggatgccttaggcgtttttgaactcatcgctatcgctgaaggaaaagtccacggcatcgagccggagaaaatccacttccatgaggtaggagcttgggattccatcgcagacattgtgggtgtgtgcgaagcgatcaggcagcttaacccaggtttgattgctgcatctccgattgctttaggattcggacgcatcaaggcagctcacggagatattccagtgccagttccagccgtggcagagctggtgaaaggctggcccacccaaaccggagctcttatggagagcaccgaacctgttggtgaattagccaccccaactggtgttgcgttgatccgtcactttgccacccaagatggccctttcccaggtggcatcatcaatgaagttggcattggtgcaggaacaaaagatacagaaggccgtccaaatatagtgcgcgcaattttgttcaacacctctaggagtaacccagatacccgcacactggtgcaattagaagccaatgttgatgatcaagacccacggctgtggccaggagtaatagagatcctctttgccgctggcgcagtagatgcatggctgactccaattttgatgaagaagggccgtcctgcacatagggtgtcagcattggtggatagctccgaggtggaagcagtgaaaaccgcattatttgcagccaccacgacttttgggatcagatcatgggaagtcgaacgagaaggcttggaccgtcgtttcgaacaagtcgaggtggacggacacaccatcaacatcaaaatcggttcccgtgatgatcaagtaatcagtgcacagtccgagtttgaagatattcggtctgcagcggtggccttgggaatttcagagcgggaagttgtggcaagaattccgcaaggcaccaccgagtaacaaccaaaaggtcgactgct

SEQ ID NO: 2070 - protein, 394 aa, Corynebacterium glutamicum
MGLWIDATAGVAGDMLLGALIDAGAELEKIQQVVEAVIPGDVLLRTEEVVRQGQRGIKLHVDAQHEHHHHRHLSTIKELLVNADIPEQTKQDALGVFELIAIAEGKVHGIEPEKIHFHEVGAWDSIADIVGVCEAIRQLNPGLIAASPIALGFGRIKAAHGDIPVPVPAVAELVKGWPTQTGALMESTEPVGELATPTGVALIRHFATQDGPFPGGIINEVGIGAGTKDTEGRPNIVRAILFNTSRSNPDTRTLVQLEANVDDQDPRLWPGVIEILFAAGAVDAWLTPILMKKGRPAHRVSALVDSSEVEAVKTALFAATTTFGIRSWEVEREGLDRRFEQVEVDGHTINIKIGSRDDQVISAQSEFEDIRSAAVALGISEREVVARIPQGTTE

SEQ ID NO: 2071 - DNA, 594 bp, Corynebacterium glutamicum
  CDS (101)..(571): RXA01091
tcgtcggaaaaactggcgatactattgataacgggcatgggttcaccttcgataaagcacggtctatgctggactatcgccttttgacacgagtatcgcaatggtcccgaacacagtccttatccatgacgaaaccgccgatctggcgacgcagatccagcggctggaacatatcatggcgtgcctgcgcgatccggtcagcggatgcccgtgggatattgaacagacctttgccagcatcgcgccccacacgattgaggaaggctacgaggttgccgacgccatcgcgcaggaagactggcccgagctacgcggcgagttgggcgatttgctgtttcagaccgtgtttcacgcccaaatggcgcgcgaggcaggccatttcgctttggttgacgtggtgaaggcaatttcggacaagatggttttgcgccatccgcacgtgttcggcgcgcagtcgaacgcgaaatccgccgaccagcaggtgaagattgggaagtcatcaaggcgcccgagcgcgcgggcaaagcgcaaaagggcgttttggatggcgtcgcgctgggactgcctgccctgatgcgcgcgacgaagctgcaa

SEQ ID NO: 2072 - protein, 157 aa, Corynebacterium glutamicum
MVPNTVLIHDETADLATQIQRLEHIMACLRDPVSGCPWDIEQTFASIAPHTIEEGYEVADAIAQEDWPELRGELGDLLFQTVFHAQMAREAGHFALVDVVKAISDKMVLRHPHVFGAQSNAKSADQQVKIGKSSRRPSARAKRKRAFWMASRWDCLP

SEQ ID NO: 2073 - DNA, 280 bp, Corynebacterium glutamicum
  CDS (101)..(280): RXA01092
tgaacccatgcccgttatcaatagtatcgccagtttttccgacgagatgacccgctggcggcgtcacctgcatcaaaaccccgaaatcagctttgattgtgtggaaactgcggccttcgtggccgagcagctgcgcagcttcggggtggatgaaattcacaccggcatcgcgaaaaccggtatcatcgccctgattcacgggcgcgaggctggccccgtcgtcggcctgcgcgccgatatggacgcgctgccgctgaccgagattaccggcgtctactat

SEQ ID NO: 2074 - protein, 60 aa, Corynebacterium glutamicum
VETAAFVAEQLRSFGVDEIHTGIAKTGIIALIHGREAGPVVGLRADMDALPLTEITGVYY

SEQ ID NO: 2075 - DNA, 280 bp, Corynebacterium glutamicum; identical to SEQ ID NO: 2073
  CDS (101)..(280): RXA01092

SEQ ID NO: 2076 - protein, 60 aa, Corynebacterium glutamicum; identical to SEQ ID NO: 2074

SEQ ID NO: 2077 - DNA, 822 bp, Corynebacterium glutamicum
  CDS (101)..(799): RXA01096
accgtgaaacaaaccggcggtgcgtgccacactggtgcccacacatgtttcgacaatgacgttttgctgtaaaagcaacaacgattaaggaagaaatcttatgaagccacgcgtgctgtcagcattaggcattggagctggcgccctggttgtctggatcagctcacgcatgaactgggtaaccatcgaggctttcgacgataaatcaggtagtgtcacccaatctattgtgggtgcaacctggtctacagaaatcatggcgcttgcacttgctttgctcgctgccttcgccgccgcgttggtgctcaagcgcatgggtcggcgcatcattggtggtatttcggcgctgatcgcggtgggtgccagcctgtctccactcgcgcttctcacccaagacccagacgcagaacgggcccgaaccctgctgacctccggtgtggcctcacagaaggctaattccggaaccctgctgtctgattgggcggagatcatcaataccaccacccatccactggcggcagtggtagccatgattggctgcgcgctagccctagtcggcggcgttgtccttgccatgcgccctgccgaggacaccgcgaaaagcaatcagtatgagcgtaaacaggctcgcgctgagaaaatccacaccgatttggcccaagatccagactccggtcgtgtgatgtggacgcactcgatgaagacattgacttcaccgagaagactcagaaatccaaagaaaccccaggtcaaagctagggtgtggcaccctgatttctttcgccatgtgtgttcgggataaccttaaacacagcattggtt

SEQ ID NO: 2078 - protein, 233 aa, Corynebacterium glutamicum
MKPRVLSALGIGAGALVVWISSRMNWVTIEAFDDKSGSVTQSIVGATWSTEIMALALALLAAFAAALVLKRMGRRIIGGISALIAVGASLSPLALLTQDPDAERARTLLTSGVASQKANSGTLLSDWAEIINTTTHPLAAVVAMIGCALALVGGVVLAMRPAEDTAKSNQYERKQARAEKIHTDLAQDPDSGRVMWTHSMKTLTSPRRLRNPKKPQVKARVWHPDFFRHVCSG

SEQ ID NO: 2079 - DNA, 1368 bp, Corynebacterium glutamicum
  CDS (101)..(1345): RXA01102
attctatggttgttgggagagatgacttaatttggaatcacgggctttaacacgcgctgacattgagcaacttcccagcatgtggaaaagcccaggtttcgtggctgtcctcgtggcggttgcagcagcgttcggcagttggtcactccttcttcccgtcgtaccgctagcggtcctcaacaacggcggatcaagcgctgtcgccggtgccaccactggcatcttcatggcagctacagtgatcactcagattttcactcccgctgcgctgcggaaaattggctacaccccagtgatggctttcgccgcattcatgctgggtgtgccagccatcgggtacatcttcagcgtcgagccaattccagtgctggtagtgtccgcacttcgaggaattgggttcggtgcgctcaccgtcgcagaatctgcgttggtggctgaactcgttcccgtacgcttcttgggcaaagcttctggaatgttgggcgtatttattggcctttcccaaatgcttttcctgcctgccgggttggcgttaggtgaccaatttggctacaacgtggtctatgttttaggtgccgttatcgcactagttgcagcggtgatgtgtctgcgtattccgcaggttaaggcagcggcaaagcagcaaccacaggtgagcgaacaggagcgttctgtttccacctggaagttggtgctggttccctccttggctgttaccagtttgtcaatgacttttggcgcagtgtcttcattccttccagctgcagtcattgagttagatccaggattaggtgctgcattagcgggtattattttatccattaccggtggttcttcaatggtgttccgctacctgtccggcgttatcgctgaccgccgcggtgtgcctggtaccacgatgattcctgctcagatcattgggttcttaggtgtcgttttaatcaccgtcacaatcttccaaggctggtccgtgtggcttttgattataggtgcagtgatgtttggtggtgcttttggcatggtgcaaaacgaagcgttgctttcaatgtttttccggcttcctcgcactagagtctccgaagcctccgccatctggaatatcgcctttgattcgggaacaggaatcggaagcttcctccttggcatagttgccgcatcgcttgcttacagtggtgcttttggttccggagccgtggtgattttgtttggaatcgttttgaccaccgccgatcgaatcattgggcggcaccgcattactgaatacaacaacacccgcgcgcgtttgcgccaggtgccagtcgctcggcgtgcagtgcaagggctgcgcaacaggcgcaaagatcgctaaaacgcttttcgacgccaccc

SEQ ID NO: 2080 - protein, 415 aa, Corynebacterium glutamicum
VAVLVAVAAAFGSWSLLLPVVPLAVLNNGGSSAVAGATTGIFMAATVITQIFTPAALRKIGYTPVMAFAAFMLGVPAIGYIFSVEPIPVLVVSALRGIGFGALTVAESALVAELVPVRFLGKASGMLGVFIGLSQMLFLPAGLALGDQFGYNVVYVLGAVIALVAAVMCLRIPQVKAAAKQQPQVSEQERSVSTWKLVLVPSLAVTSLSMTFGAVSSFLPAAVIELDPGLGAALAGIILSITGGSSMVFRYLSGVIADRRGVPGTTMIPAQIIGFLGVVLITVTIFQGWSVWLLIIGAVMFGGAFGMVQNEALLSMFFRLPRTRVSEASAIWNIAFDSGTGIGSFLLGIVAASLAYSGAFGSGAVVILFGIVLTTADRIIGRHRITEYNNTRARLRQVPVARRAVQGLRNRRKDR

SEQ ID NO: 2081 - DNA, 348 bp, Corynebacterium glutamicum
  CDS (101)..(325): RXA01103
ccgaagcagagtacaaggctgttgcccgtgcgctgcgcggtgccgtagagatggatcctcgtcaaacaggaatcccatccactaagggagcgctctagacatgaactcttctcccatctctgatatggtcactgcggctgtgcagaacgaaccagatgcgggcgaccgatggtttatttatggtttgttcctcatcgccgggcttttctttggcggtgcctggtctgcatataaatcagaaaacaaaatcctcatggttgcagccggcctcatcgcagtgctggcagtggctggaggaattctatggttgttgggagagatgacttaatttggaatcacgggctttaa

SEQ ID NO: 2082 - protein, 75 aa, Corynebacterium glutamicum
MNSSPISDMVTAAVQNEPDAGDRWFIYGLFLIAGLFFGGAWSAYKSENKILMVAAGLIAVLAVAGGILWLLGEMT

SEQ ID NO: 2083 - DNA, 1323 bp, Corynebacterium glutamicum
  CDS (101)..(1300): RXA01107
gggtacatcagagttcatttgaattagacttaaaacttaaaatgaccaccccagatttacctgaattaaacccgctttcacctttgagatactggaaggaatggatttcacctctgtgaatgatcgaaacgtccctgcacccaacacctccattcctttcccagttgacctgaatcgagtgacggaggctgttgattccttgggctaccactatttgagctcagaagatcgcatcatcgtgccgtggcaagatcaccgcatttcgatgtacttcagccacgaatcagggcaaatgctcaccatccttggtcgcacgcgccttaatttggacatgtttgccatcaacgatgcggcgcgagctgtcaccgaatggaatgccgaacgcatcgggccaacagccctcgtccatctgggcaacgacggcgaagtggaattgaaattccgcacgaccatctgcatcgatgaagggttaagcacccaacagctacgccaattcatcaacctgtccttggacaccaccgccatggctgtgacctatattctggagcgtttttcagaacttaacttcagcgacaccggaagccctgacgacacgaacaatgccgatgaactcagcgacgaacaagaccaagcagatctcgtagagaaaatccgggggctgtacgttcccactccagttgaagagctcatcgaatccctagaagacgcagagtgggaagaatcagacatggcagacgaggatgcagaagacgactacctagacgatgactcagaaatcgaatgggaaacagacgatgactacttcgaacctgaagaagtcgacatggacgaactcctcaacggtttcctcgaagattctgacatcccccaggaagtcaccttggaacgcattcgggcacaactgcatgccatcggcgtggtaaaaaccagcggcgaagacgatttcatcatcgcgtggatcaacgaagtgtttttaggcttcttcgttgataatggccccactttcctggtgaaaggtcactgggatcccagcatggaccccacacgcgacttcatgaaactgttcatgatgtgcaatcagtggaacgaaaactctctgactaccaaagctttttgccatactgatgacaagggtctccaggtccgggtagagttcgcggtctctgtcgctgaaggcctcaacgacgatcaactacagcacaacatcgcactgtcaattcatcatattttgcaagcgattgattccatcagcacagaagccactggatcatcaacggtggaatggccggagaaaaaccgctgatcattaaggtcttccaagaa

SEQ ID NO: 2084 - protein, 400 aa, Corynebacterium glutamicum
MDFTSVNDRNVPAPNTSIPFPVDLNRVTEAVDSLGYHYLSSEDRIIVPWQDHRISMYFSHESGQMLTILGRTRLNLDMFAINDAARAVTEWNAERIGPTALVHLGNDGEVELKFRTTICIDEGLSTQQLRQFINLSLDTTAMAVTYILERFSELNFSDTGSPDDTNNADELSDEQDQADLVEKIRGLYVPTPVEELIESLEDAEWEESDMADEDAEDDYLDDDSEIEWETDDDYFEPEEVDMDELLNGFLEDSDIPQEVTLERIRAQLHAIGVVKTSGEDDFIIAWINEVFLGFFVDNGPTFLVKGHWDPSMDPTRDFMKLFMMCNQWNENSLTTKAFCHTDDKGLQVRVEFAVSVAEGLNDDQLQHNIALSIHHILQAIDSISTEATGSSTVEWPEKNR

SEQ ID NO: 2085 - DNA, 774 bp, Corynebacterium glutamicum
  CDS (101)..(751): RXA01108
gtggccagtggaagttctgcgactaatccacagagcttaaaactccggttgtcagttcaggttgcaaagttaacagtcaacggctgtattctttagagccatgacataccccggcatcacctctgaccacaatccttatgatggatacacaggcgatgacggggccggaaacaagcgcaacctcccaaaccgaaagaaaataaacaaatcggtgggagtttacgctggtgtgtttgccctaacattggctttatacgccattgggggagccgcatggggactgctccgacccacttataccgcttatgttgaagacgctgaaacagcctccatagcggtggaaaccaacacttcttttgccggctatgcctggtttgcgatcgccaccggtgtgcttgcagcagcaatcgcattattcgttttcctgcgcacccctcaacatcgaggcccagttatgctcctatggctgggaattgtatctatcgcaggttccgtggcattcctggtgtttggaaacgtggcctcgacgatgcttcatggttcaccatctgattacgcctcagcgatcggtgcgtctttccaggtagcacccactattacccctggtgttgcgtttggggtcgctccatttttgagtgtgtgcatgtattggtgcgcggcatttgtgacacctgaagaagagatagaccaggacgacgcaggccaggggacttcgaaagcatcggggtctgagatgactggggctagtggctaggggctagatgtgcgcaaaca

SEQ ID NO: 2086 - protein, 217 aa, Corynebacterium glutamicum
MTYPGITSDHNPYDGYTGDDGAGNKRNLPNRKKINKSVGVYAGVFALTLALYAIGGAAWGLLRPTYTAYVEDAETASIAVETNTSFAGYAWFAIATGVLAAAIALFVFLRTPQHRGPVMLLWLGIVSIAGSVAFLVFGNVASTMLHGSPSDYASAIGASFQVAPTITPGVAFGVAPFLSVCMYWCAAFVTPEEEIDQDDAGQGTSKASGSEMTGASG

SEQ ID NO: 2087 - DNA, 765 bp, Corynebacterium glutamicum
  CDS (101)..(742): RXA01109
gggtcgtcagctagattgctttgctagggtaatctgcgtgaaccgtccgggaatttttaagttttccggagcatgtcgatgatttatcaggagcagaactttgtctattagcctttcctcaaagaaggttgctttcgcagcactcatggtcaccccacttctcttgaccgcatgtggcagtgattcatctgatactgaagcagcctcatccagcgcagcgacgacgacaaattcttcctcatccagcgcagcgacctcggcggaagcagcagaaaccacctcgtccgaatctgaatcttccgaagcaacaaccattaacgaagagcagcaagcacagcttgatgtactgtctcaagagctgtctgagaacccaattaccttcgctgaagctgcgccagttgaaaacggcgagaccgcttccccagaagacacagctgccatcgaggctctggttcgcggatacactgacaccaacaccttgcgtagctcccttgcgtacaccatcaacaacacctgcacccgcgttcttgaagccagcggcgctgacgctacccagcttgatctcaacaccatccctgatatcccactgggtggcgaaggcaccggaactgttgattccatcaccgatgttgtggtcaacggccaggaagcatccgcatgggtcgtagcaaccgccggtggaaccaccgactctgcaacccagcgcttcttcaacgaaggtggccagtggaagttctgcgactaatccacagagcttaaaactcc

SEQ ID NO: 2088 - protein, 214 aa, Corynebacterium glutamicum
LSISLSSKKVAFAALMVTPLLLTACGSDSSDTEAASSSAATTTNSSSSSAATSAEAAETTSSESESSEATTINEEQQAQLDVLSQELSENPITFAEAAPVENGETASPEDTAAIEALVRGYTDTNTLRSSLAYTINNTCTRVLEASGADATQLDLNTIPDIPLGGEGTGTVDSITDVVVNGQEASAWVVATAGGTTDSATQRFFNEGGQWKFCD

SEQ ID NO: 2089 - DNA, 1053 bp, Corynebacterium glutamicum
  CDS (101)..(1030): RXA01119
ccgtaaagacgttggcgaagtcatcatcaacggtgccgttgcccgtggcgaagccgaaccagagatgttggaagctgtcgcagaagaaaagaccgcgtagttggcaggagttatcaccggctttgccatcatcctgtcggttatcggcgttggatttcttctggcaaagctgggggtcatcaatgatgacaaacagcgcttggtgttaaaccgcattgctttttatgcggcaactccagcgctgcttttcaatgtcgttgcccgatcagatcccagcgcgttgatctcaccggtcattgtggtgacatttgtggccacgatcgtcacagcagctgtgtactgcgtgatttcggcgattttctttaagaaggatatcgccactacggcgacaggagctgcggcttctgcctacgtgaactccaacaacattggcctgccggtgtctatttatgtgctgggaacaggcgcatatgtggcaccgattctggtcatgcagatggtgattttcgcgcccatgatcctggccgcgctgacctctggtgatgtgaaaggctcgcgcgggcaaaaaatatgggctgcggtgaaaggttcactgctcagcccaattgtgttggcctctatcgcgggcctgatcgtgtgtctgttagaaattcagctgccagccgcagtcatggaacccaccatcattttgggcggcgcatccattccgttgattctgatgagcttcggcgcatcattgccctcaaccaacgtgctggcttccaaggcggatcgccccagcgttcttactgctactgcgataaaaattgtgggtatgcccgccatcacttggctgatcgccaaggcgtttggtctggagggcgattacctctacgccgctgttattttggcggcgctgcccgccgcgcagaatgtgtacaactacgcggcgacgtaccgcaagggcgagatcgtcgcccgcgatacggtcttcctcaccacgttcctagcgctgctgggcatgctaggaatcgcggccctatttggtcgctagggcttcaggctgcttttcga

SEQ ID NO: 2090 - protein, 310 aa, Corynebacterium glutamicum
LAGVITGFAIILSVIGVGFLLAKLGVINDDKQRLVLNRIAFYAATPALLFNVVARSDPSALISPVIVVTFVATIVTAAVYCVISAIFFKKDIATTATGAAASAYVNSNNIGLPVSIYVLGTGAYVAPILVMQMVIFAPMILAALTSGDVKGSRGQKIWAAVKGSLLSPIVLASIAGLIVCLLEIQLPAAVMEPTIILGGASIPLILMSFGASLPSTNVLASKADRPSVLTATAIKIVGMPAITWLIAKAFGLEGDYLYAAVILAALPAAQNVYNYAATYRKGEIVARDTVFLTTFLALLGMLGIAALFGR

SEQ ID NO: 2091 - DNA, 645 bp, Corynebacterium glutamicum
  CDS (101)..(622): RXA01122
tattcgaccaaggctgagcaaaaaggcgctaagctgtggggagatcgcaagcccctatccggcctctactaagccccgaagttgaagggaaactcccccaatgccgtttccagcactgttgttgccgctgattttctggacaggaattgcagctttgtcctcttgggcggtcagccgtgcacttccgctgcgcgccgataattccattgagattgatgcgccggtggaaaaggtctgggatttcatcgaggagaccaaccgcgtgccggagtggaatgagcacattctgtacgtgcaggcgcctggtgagatcgagcagggcatgaagctcaagatgaaaacaaggcacccagagaccaatcgcctcactttgaagtttcgccccaccatcgacgtgctgcgtccacaccgtgaattgacgtggtccaccaaaattgttgcgcgttggctgctcaccgtcaccgacacgatcgagctgaagcctttggaagatggtcgcactgaggtggatcaatcaatgtcctttagtggcgtactatcccccggagtgccctttttggccagcatcagcaggatcaaagagaactcaaaccgccagttgaaagcactgatcgaagccgagtaaacctccaacccctacataac

SEQ ID NO: 2092 - protein, 174 aa, Corynebacterium glutamicum
MPFPALLLPLIFWTGIAALSSWAVSRALPLRADNSIEIDAPVEKVWDFIEETNRVPEWNEHILYVQAPGEIEQGMKLKMKTRHPETNRLTLKFRPTIDVLRPHRELTWSTKIVARWLLTVTDTIELKPLEDGRTEVDQSMSFSGVLSPGVPFLASISRIKENSNRQLKALIEAE

SEQ ID NO: 2093 - DNA, 570 bp, Corynebacterium glutamicum
  CDS (101)..(547): RXA01123
aaagagcagtgatttttcccgatccccccctggccgcctagcggaaattattgataccgcgtggcggttggtggaaacacgtggctgggcgaatgtgagcatgcgaaccctggccgcggagctaaatatcaaggcgccgtcgctgtacaagcatgtaaaaacgcgcgaggatatcgccgcacacatcgccacgaaggcatttattcagctggggcaaagcctgcatgaacattgtgaaagtgtggaggatttgcttgcggaataccgctccatggctcgggaaaatccaaatatttaccggcttctcaccagttcagagttcccccgcgagctacttccagaaggcctagaaacttgggcaggaacgccattctacctggtcaccggccacgatccgatcaagggtcaagcactgtgggcattcgcgcacggcatggccatcctggaaatcgacgcccgattcgccggccccaacaatggatcccccgcggatggcgtgtgggagatcggcgcgcgggcatttgacacacaagtattcgaccaaggctgagcaaaaaggcgctaagctgt

SEQ ID NO: 2094 - protein, 149 aa, Corynebacterium glutamicum
MRTLAAELNIKAPSLYKHVKTREDIAAHIATKAFIQLGQSLHEHCESVEDLLAEYRSMARENPNIYRLLTSSEFPRELLPEGLETWAGTPFYLVTGHDPIKGQALWAFAHGMAILEIDARFAGPNNGSPADGVWEIGARAFDTQVFDQG

SEQ ID NO: 2095 - DNA, 302 bp, Corynebacterium glutamicum
  CDS (1)..(279): RXA01127
ggaattggcctcgcagcatccggcaacatcgatgccacgggcaccaacccttccatgttcgagccagtccacggctctgcaccagatatcgcaggccagggaatcgcagacccaacggcagcaatcctatccgctgcgatgctgctgcgtcacttaggtgatgaagacaacgcagtacgtattgaaacagccatcgcagctgatgtggctggccgagataactctcagccgatttctaccactgaggtgggagaccgcatcgtcaaggcgctgcaaagctaaatttcaacgccgaccccctt

SEQ ID NO: 2096 - protein, 93 aa, Corynebacterium glutamicum
GIGLAASGNIDATGTNPSMFEPVHGSAPDIAGQGIADPTAAILSAAMLLRHLGDEDNAVRIETAIAADVAGRDNSQPISTTEVGDRIVKALQS

SEQ ID NO: 2097 - DNA, 1989 bp, Corynebacterium glutamicum
  CDS (101)..(1966): RXA01129
caatataacgcactttaacatatttccccccatctttttgttctcaaatttatttgtactcgaatgcaggatttcgagacaatgaggcagtttttcttttatggttaatctcatgtcggtcgaactcgaagaaatccgcgatttcttagcaggatttgaacctttcgcgcagctaccagccgaggaactagatcagttacctggaaaaatgagcttgcgctattttcggcgtggggaagagatcatcccaattggtgtgcccaatcattacatgggggtaatcagatcgggtgccattgatgttcttgatcaggagggcgtactgctggatcgccgtgacgcggggcgctcgtttggctattccacgatggggccagaacgaaattctcggtaccgtatggttgccgtggaagattccttggtgttgcgtctggggcgtgatgattttgatgagttagccaagcgcaaccctgatctgaaccgttactactccagctggtcgaagcgtatccgcgccgctgctgatcaattgcgccaagaatctagttcgaaggtgctgcgcacgaagttgggggagttcaagatcgccaacccgatttcctgcagcccggacaccacgatcatggatgctgccatcaagatgcatgagttcggggtgtcttcgttgctggtgcagatcgatggggaactcaaaggcatcatcaccgatcactatatgcgcagcagggtggtggcgaagcatttggatattcagctgccggtctctgaggtcatgacggtggatccgcgttgcgcgacctcgcaggggttggcttttgaggccatgttgttgatgtcggagctgcgcattcaccacttgccgattgtggatgatggccaaatctccggcatcgtcactgcagctgacatcatgcgcttgctgcgccacgatccgatttacctcactgcggatctgtcgcgaaaaaataccgtggaggaattggccaacaccttccagtcggcagcggaggtggcttcgagatttattgatcggggagcttctgcggaagaagtcagtagcttgctcaccgtggctgcggattctttggcaagaaggctccttgtgctggcggagcggaaatttggtgcaccgccagttccgtattgctttgtggtggtgggctcgcagggcaggaaagaaatgggactggcctctgatcaagacaatgcccttgttctggacaattcctacaatgaccgcgagcatggacagtattttgcagcgctgagtgaattcgtgtgccagggcctcgaccgcgcaggacaggtgctgtgtccgggtgacatgatggcatccaatccggagtggcggaaaactgctgaccagtggatctccaccttccattcctggattactgcgccggagccggatgcgttgctgcatgcccagacattctttgatttcaggggaatttacggcgacaccgagatggctaaggatgtccaccaaaatgcggtgaatatggccaggggtgcgcgtcgcatgcatgcacacttggctagtcttgcggcccggcgcgatcctccgctggggtttttccgtggtcttgtggtggagcgttctggtgaatacggcgcgacgatggatattaagaagggtggcaccgcgggcatcgtgcagatggcgaggctgtatgcgctggccacgggtagtgatgcgattgggactcgggagcggttgattgctgcgtcgggccatggtcaggtgtcgcgtaagggtgcgcaggatttgttggatgcctttgatttcttagcggcgatggcgttccagcaccaggcgcggttgatcaaggtgggggagaagccgaactatcacattgatcccaagacgttgggcaagatggatcgggagcatttgcgcgatgcattttccattattaaagatatgcagtcggcgttagctactaaatatccggtgaggaacatctagtgttggggcgtcgaaaagcg

SEQ ID NO: 2098 - protein, 622 aa, Corynebacterium glutamicum
MVNLMSVELEEIRDFLAGFEPFAQLPAEELDQLPGKMSLRYFRRGEEIIPIGVPNHYMGVIRSGAIDVLDQEGVLLDRRDAGRSFGYSTMGPERNSRYRMVAVEDSLVLRLGRDDFDELAKRNPDLNRYYSSWSKRIRAAADQLRQESSSKVLRTKLGEFKIANPISCSPDTTIMDAAIKMHEFGVSSLLVQIDGELKGIITDHYMRSRVVAKHLDIQLPVSEVMTVDPRCATSQGLAFEAMLLMSELRIHHLPIVDDGQISGIVTAADIMRLLRHDPIYLTADLSRKNTVEELANTFQSAAEVASRFIDRGASAEEVSSLLTVAADSLARRLLVLAERKFGAPPVPYCFVVVGSQGRKEMGLASDQDNALVLDNSYNDREHGQYFAALSEFVCQGLDRAGQVLCPGDMMASNPEWRKTADQWISTFHSWITAPEPDALLHAQTFFDFRGIYGDTEMAKDVHQNAVNMARGARRMHAHLASLAARRDPPLGFFRGLVVERSGEYGATMDIKKGGTAGIVQMARLYALATGSDAIGTRERLIAASGHGQVSRKGAQDLLDAFDFLAAMAFQHQARLIKVGEKPNYHIDPKTLGKMDREHLRDAFSIIKDMQSALATKYPVRNI

SEQ ID NO: 2099 - DNA, 990 bp, Corynebacterium glutamicum
  CDS (101)..(967): RXA01131
gaattcattcaaggtggtaaggcggttttcgctcttttaatacagttttaaaggtagatttgggagagaagatttcccttaagaaaggttcttaacaaccatgccgcctgcgacgctgttcaatgttttgacttcagctggacttgaccctcaccagtcaggtgatgccattgttgtcgagtctgcccatttcacattgacgttcacgtgggatgagtggctgcgagctcaagcgacgtgggtgggggagttgagtgcgtcggattatgtgcgttctattgtggcgattaactctgcccatgatgcacgggcaacgccgaagatgatgttggatgccccgactggtctgacaacggtgcttaaggcggataagggtcagttgcaggcgtttgccgtggaggcgctgccgattggcgatggcctcagcgaggctcagttggcggggtttgtggctgccgcgtttgatggcgccatcgacctcactcgtgagtttcatgcactttacccggagcgctcgccgcaggagcgcggcgcaatgctcaacattaagcttgtcgacgcctccccctctcaaacagttacgcccgtgcgagtagctaactggttcatggatcagggggtggaggaagttccttatgatgcagcttctgggcgcatcagctttgagctgggtgacaccccagtggatgtgattttggatgatcccgagttgttgaagatccaagccgtggtggttgctgaccgcgatgtggaagccactgaagttttacatttgtgtaatcgagcgaacctggattctgatcactccaccatttttatgcgttcggatggggatgatgtggatttcgtcgccacggttgcggtgccgattcgtgctggtctgaacgatttccagttgagtcaagccctgcatgatggggtagtgggggttgttgggcaggtacgagctgtgatcaatcagctacactagtgaagtccatatagtgagaa

SEQ ID NO: 2100 - protein, 289 aa, Corynebacterium glutamicum
MPPATLFNVLTSAGLDPHQSGDAIVVESAHFTLTFTWDEWLRAQATWVGELSASDYVRSIVAINSAHDARATPKMMLDAPTGLTTVLKADKGQLQAFAVEALPIGDGLSEAQLAGFVAAAFDGAIDLTREFHALYPERSPQERGAMLNIKLVDASPSQTVTPVRVANWFMDQGVEEVPYDAASGRISFELGDTPVDVILDDPELLKIQAVVVADRDVEATEVLHLCNRANLDSDHSTIFMRSDGDDVDFVATVAVPIRAGLNDFQLSQALHDGVVGVVGQVRAVINQLH

SEQ ID NO: 2101 - DNA, 483 bp, Corynebacterium glutamicum
  CDS (101)..(460): RXA01137
tcggtttgaacgcaactgcttgcgcttgggtgagctttgaggatgtcttcattcctggggctcagattctaagccacgatttccttaccttgtggcatcggtgcgcccaaccttcgtgatcctacggatctccgaatacttcggtgtcgctgaagctgcgattaatgcagccactggacgtctgaccagcctcagcgaagtgtttatcgacaacgctgccgagatccaagacaacctttcttcgctggtcgcgcttcagaaagatttggcagagcgagtcaacgttgaaggagtcaatcctgttactccagttgatctactggaacttcgcctcggttccgcgcagctggccgttgctgcaactgccattgaggttcgtgttgctggaggagcaggttatgtaaagtcttcatcaacgtctcgtcgtttccgtgttgaaatgggagcttgcacgggtccgtgatctacaggccacgcaaaact

SEQ ID NO: 2102 - protein, 120 aa, Corynebacterium glutamicum
VRPTFVILRISEYFGVAEAAINAATGRLTSLSEVFIDNAAEIQDNLSSLVALQKDLAERVNVEGVNPVTPVDLLELRLGSAQLAVAATAIEVRVAGGAGYVKSSSTSRRFRVEMGACTGP

SEQ ID NO: 2103 - DNA, 257 bp, Corynebacterium glutamicum
  CDS (34)..(234): RXA01156
aagaactaagaaataccgatttacggcaggagagtgagtgtagtgaacgcaaagcaaacccaaattatgggtggcggcggacgtgacgaggacaacgccgaggattccgcacaggcatctggacaggttcagatcaacaccgaaggtgtggacagcttgctggatgaaatcgacggactgttggaaaacaacgccgaggaattcgttcgttcctatgtacaaaagggtggcgaatagtcactgtgagtaccgtggaa

SEQ ID NO: 2104 - protein, 67 aa, Corynebacterium glutamicum
VSVVNAKQTQIMGGGGRDEDNAEDSAQASGQVQINTEGVDSLLDEIDGLLENNAEEFVRSYVQKGGE

SEQ ID NO: 2105 - DNA, 1065 bp, Corynebacterium glutamicum
  CDS (101)..(1042): RXA01158
taggacgttcaaggaattggctgaatcaacaagcgccaaggtggttaagcgccctcggcgagttatctcaaaaaagaagaagaagtctcctacgggagagatgtccattgttgagcacatcaaagagtttcgacgccgacttcttatcgctctggcgggcatcctcgtgggcaccattatcggctttatttggtacgatttctcattttggcagatccccactttgggcgagctgctgagggatccgtactgttctctgcctgctgaatcccgctgggccatgagcgactcagaggaatgtcgactgctcgcaaccggcccgtttgatccattcatgcttcgccttaaagtagcggcgttggtgggtatggttcttggctcacccgtgtggctgagccagctgtggggctttatcaccccaggtttgatgaagaatgagcgccgttacaccgcaatcttcgtcacgattgctgttgtgctgtttgtcggcggtgctgttcttgcgtacttcgtcgttgcatatggtttggagttcctccttaccattggtggagacacccaggcagcggccctgactggtgataagtacttcggattcttgctcgcgttgttggcgattttcggcgtgagcttcgaagttccactggtgatcggcatgctcaacattgtgggtatcttgccttacgatgccattaaagataagcgacgcatgatcatcatgattttgttcgtgttcgctgctttcatgacacccggccaggatcctttcaccatgttggtgttggcgctttcactcaccgttctggtagagcttgccctgcagttctgtcgcttcaacgacaaacgccgggacaagaagcgcccagaatggcttgatggcgatgacctctctgcatcaccactggatacttctgctggtggagaagatgctccaagcccagtcgaaaccccagaggcggtggagccttcgcggatgctgaacccaagtggggaggcgtcgataagctataaacccgggcgcgccgacttcggtgacgtgctctagggcctagccaggtaccctta

SEQ ID NO: 2106 - protein, 314 aa, Corynebacterium glutamicum
MSIVEHIKEFRRRLLIALAGILVGTIIGFIWYDFSFWQIPTLGELLRDPYCSLPAESRWAMSDSEECRLLATGPFDPFMLRLKVAALVGMVLGSPVWLSQLWGFITPGLMKNERRYTAIFVTIAVVLFVGGAVLAYFVVAYGLEFLLTIGGDTQAAALTGDKYFGFLLALLAIFGVSFEVPLVIGMLNIVGILPYDAIKDKRRMIIMILFVFAAFMTPGQDPFTMLVLALSLTVLVELALQFCRFNDKRRDKKRPEWLDGDDLSASPLDTSAGGEDAPSPVETPEAVEPSRMLNPSGEASISYKPGRADFGDVL

SEQ ID NO: 2107 - DNA, 438 bp, Corynebacterium glutamicum
  CDS (101)..(415): RXA01159
catcaatcaatgtgcaagggtttcatttctggaaatcgtggtcaccccacattcaccagtcatgaacaagcttgtttaatgtgaatttggagtagaccacatgtccctcggaccatgggaaattggaatcattgtcctgctgatcatcgtgctgttcggcgcgaagaagctgcctgatgcagctcgttccatcggccgttccatgcgcatcttcaagtctgaagtcaaagaaatgaacaaggacggcgataccccagaacaacagcagcagcctcagcagcagattgcgcccaaccagatcgaggctcctcagccaaactttgagcagcactaccagggacagcaggttcagcagcctcagaaccctcagacccctgactaccgtcagaactacgaggatccaaaccgcacctcttaaagttgggcagtttgcatcta

SEQ ID NO: 2108 - protein, 105 aa, Corynebacterium glutamicum
MSLGPWEIGIIVLLIIVLFGAKKLPDAARSIGRSMRIFKSEVKEMNKDGDTPEQQQQPQQQIAPNQIEAPQPNFEQHYQGQQVQQPQNPQTPDYRQNYEDPNRTS

SEQ ID NO: 2109 - DNA, 998 bp, Corynebacterium glutamicum
  CDS (1)..(975): RXA01160
aaatcatccaacaaaatcagcgaccttgcccgccagcttaatctgttgccgtatttcaccaggtataaaggccgtaccgtcatggaagcagcgcgcgatcttggccaaccctcctcccaaatcatggaagacctcaacagattatggatgtgtggtctgccaggacttcttccaggtgacttggtggagcttgatcattcctttaaggaagtaaaaatccacaatgctcaaggcatggataaacccttgcgcctcacaccaactgaagccggtgttttgctgctgacacttgaatccctggaatccctccccggtattgcgaaacaggaagcggtcgtatctgctgcgaacaagctacgcgccatcatgggggagtattcctcgactgttttcgactccactggagaagacctcgatgctgaagttctagagatcatccgcgacgccatggatttacaccagcaggtcagttttgaataccactcgcacagatcagacaacaccagcctgaggcaagtcagccctgctcatatcttcacccatgaaggcgaaacctacatcaaagcctgggaagaagctgtgaaccaatggcggacgtttaggcttgatcgcatccgaagcattgtgcttcttgacagcaaagcagtgcacccggcgcgaggggtttcagtatccacggacgatccttttgagttcgcaaaatcttccgatattgccacgttattgctgcgtgaggacgcaatgtggttaggcaattacatggccatggaggtggatgaaacggtggaaccgattcgcgatagcgacggattcagctggcacacagtccactttccgctgctttctagggattggttcgtccgattcgcgattggccatgctgagcatttgaaagtaactagtcccgaagatcttcggaaatgcataaagcaaaaggcttttagtggtttgtcagcgtatgatcatcacgtagagtaacacccaagagtaagacgcaa

SEQ ID NO: 2110 - protein, 325 aa, Corynebacterium glutamicum
KSSNKISDLARQLNLLPYFTRYKGRTVMEAARDLGQPSSQIMEDLNRLWMCGLPGLLPGDLVELDHSFKEVKIHNAQGMDKPLRLTPTEAGVLLLTLESLESLPGIAKQEAVVSAANKLRAIMGEYSSTVFDSTGEDLDAEVLEIIRDAMDLHQQVSFEYHSHRSDNTSLRQVSPAHIFTHEGETYIKAWEEAVNQWRTFRLDRIRSIVLLDSKAVHPARGVSVSTDDPFEFAKSSDIATLLLREDAMWLGNYMAMEVDETVEPIRDSDGFSWHTVHFPLLSRDWFVRFAIGHAEHLKVTSPEDLRKCIKQKAFSGLSAYDHHVE

SEQ ID NO: 2111 - DNA, 805 bp, Corynebacterium glutamicum
  CDS (101)..(805): RXA01163
accgtacccacagacacaccagaattaacagaaacagactgaaaaacaacatcgctcgacatgcgcgtaatcctaacccgcgcacactaatgtggccgatatgggctacaccaacctcaacgacacacgggtcttgcgcgccgggtcatgtgatgcctggtggcgcacgatgtctccgctagtgcagcagggaagtgaggcagtctttcggcgcatcatgggtctctcgcggcgtcctgatcggaaacctggctttgacgatgtcccacatttcggcgcagctgttcgagttcccggtctaaaacacggcacgttggtcaatgctgcacccttgaaagttttgggcgcacggggcgagcccaaccccgcgagttcgtaccgttttgaatacatcaccggtgattccgcaggtcgagccatcactgcgaccggcgctgtcctcttttccacacgcccctggacaaccggcccgcgtcccgcgatcgccatggctccatccacccaaggcgtcgcacagcactgcgatccctcccacacctgcgccatcggactcaacgcattctatgacaaacccttcgacgcaatcattgcttacgaactccccgtcatcctctggtttctagctcacggacttgacgttgtgttcatcgattacccccgcgaccccgcaaccggcgtccaatactattgcgattccatcgctgcagctaaatcgcttctcgacgccgtcctcgcctccagacaactcggcctttcaccggaagcaccgcttggcctgtggggattctcccaaggaggcggcgcc

SEQ ID NO: 2112 - protein, 235 aa, Corynebacterium glutamicum
MGYTNLNDTRVLRAGSCDAWWRTMSPLVQQGSEAVFRRIMGLSRRPDRKPGFDDVPHFGAAVRVPGLKHGTLVNAAPLKVLGARGEPNPASSYRFEYITGDSAGRAITATGAVLFSTRPWTTGPRPAIAMAPSTQGVAQHCDPSHTCAIGLNAFYDKPFDAIIAYELPVILWFLAHGLDVVFIDYPRDPATGVQYYCDSIAAAKSLLDAVLASRQLGLSPEAPLGLWGFSQGGGA

SEQ ID NO: 2113 - DNA, 696 bp, Corynebacterium glutamicum
  CDS (101)..(673): RXA01165
agaccactcacattgcacatctgcagctgccaggaagtctccacccaacagttttctaggtcacagggatccattagccatttggtccttgtcgaaaggtatggtggggcatgtgcctgcagcaatagcaatcccatatttcattattgagatcctcgccttcattggtgtcgtcatgtggctcggtttcggctgggctttgggtctcctcgtattgttcttcgtcggtggacttcttctagccggcgtggagcttcgtcgcattagtaagagtgccgccattcatcaggcttcgggccagggaagtgcgggagcgatcgccggaaacattgggctgaccgcagctggtgccattttggtggccatgccggggtttgtgtcttcgattatcggtttgttgttcatttttgcaccaaccagggcgctgttccgcaaggttttggccaagcgcatgcgcagtgccatcgagaacctaggtgtgcgtggttttgaagccgttaatggttaccgcacccaggcatcctacggaaacttcggagcggcattcaatggtggtgcgcaacaaccatcaaatgagccgatcgtgattgatgaagacgagatccaagcctggacttctgatctcaaacctgaagatttcaccaaaggtaaagatgaatccgacggtgagaaataagtgacactgtttgttcggct

SEQ ID NO: 2114 - protein, 191 aa, Corynebacterium glutamicum
MVGHVPAAIAIPYFIIEILAFIGVVMWLGFGWALGLLVLFFVGGLLLAGVELRRISKSAAIHQASGQGSAGAIAGNIGLTAAGAILVAMPGFVSSIIGLLFIFAPTRALFRKVLAKRMRSAIENLGVRGFEAVNGYRTQASYGNFGAAFNGGAQQPSNEPIVIDEDEIQAWTSDLKPEDFTKGKDESDGEK

SEQ ID NO: 2115 - DNA, 506 bp, Corynebacterium glutamicum
  CDS (1)..(483): RXA01166
ctcaccggagtgattgcctacgccatcgcgggacttgcagtgaactcttcagagatgtttgaggaaatcatgtcggtgttaaatgaacgcggagtcagtgatgtgctgaaaaatatcaccagctgcgcgggaggttccttgttggccagtggctactcgtcttcccgcgggtggacacatcagggcacgccgctggcagacattctggacgatctgccacttgttgtcgctgagtttgggaagcaaaagctgggtcgtgtggcgccagaaatcccagtgctgttgtggggctctaaaaatgatgatgtcattcccattgatcccattagggaattgcgtgatagctgggcggacaagggtacgccattgacctggcatgaatcccaagcgccgcgtgtgccaggacgcacaggtctcaaccatttcgggccctattttagaaacctggaaaagtactcgggatggctcatagatcatcttgtctgagtgccgttttaaaggctcgg

SEQ ID NO: 2116 - protein, 161 aa, Corynebacterium glutamicum
LTGVIAYAIAGLAVNSSEMFEEIMSVLNERGVSDVLKNITSCAGGSLLASGYSSSRGWTHQGTPLADILDDLPLVVAEFGKQKLGRVAPEIPVLLWGSKNDDVIPIDPIRELRDSWADKGTPLTWHESQAPRVPGRTGLNHFGPYFRNLEKYSGWLIDHLV

SEQ ID NO: 2117 - DNA, 606 bp, Corynebacterium glutamicum
  CDS (101)..(583): RXA01170
tacaggaaactttcaggcataggggagtcatgaaacagaacggcaagctaaggtgacatagtcacttaaactaaacaagaagggtggaggacccaagcacgtgagtctttcaaacaaagctaaaggaatcgttgcagtaatcatcgtcgcctggatcgtcgcgatggctggcatggtcgcatacgcgtcaagcaataatgctgataagacatttccaactgcaggtgcgctagaacaaaccgtcgcagcatttgataggcaaggccttcaggtctctgcagtcgcactggcagacatctacggcgatgaatacgtctccgcggcgattctgtgcgaaggaactccaaccgcaacactcgagcagtcactgggcgtagacctgtctgagctgaacctggacgagtctggtgttccttcgggcgtgtcctacttggctctgtccaatcaggatggggaagttgtctacgacaagattgatcgtgccaacgttgatctctgcgcaacgccactcaatggtgctttcagcgcttattcattgatgccagttgccaaggttggcgagaactcctgggcgatcgccgcttagggttttaagggtcaatccgc

SEQ ID NO: 2118 - protein, 161 aa, Corynebacterium glutamicum
VSLSNKAKGIVAVIIVAWIVAMAGMVAYASSNNADKTFPTAGALEQTVAAFDRQGLQVSAVALADIYGDEYVSAAILCEGTPTATLEQSLGVDLSELNLDESGVPSGVSYLALSNQDGEVVYDKIDRANVDLCATPLNGAFSAYSLMPVAKVGENSWAIAA

SEQ ID NO: 2119 - DNA, 816 bp, Corynebacterium glutamicum
  CDS (101)..(793): RXA01171
gtagaaattttccatgcagaggaaagccgataatggggcagaaccccttcccgccaaaatgacataatgtacattatcggacaattatccatatctggccatgtcgcaggccgctggtaagtttaagcccatgacttcaacgctcgccgaatcaacacttacatcccttaaagaacttgaggatccaaagatcctttccgtcaatgaacgccacggcgatgatcacgcagtgaacctcaccaagcttcgcgccgttgccaaagagctgaaaaagaaccagccgctggctcgtgagctttgggcaaccgacgatacagccgcacgtttggtggcgttgcttatttgccgacccaaggaatttgatcagtctgaactcgactcgatgatccatgaggctcgcacgccgaaggttcttgattggttgatcaattatgtggtcaagaagaatcctcattggaacgatctccgtgtgctctggcttgaagatcccgccgagaatgttgcggccgccggctgggctctcaacactcatgccgttatcacaaagccggacgcattggacgattccgaaatccttgacaccattgaagctcagatgaaaactgccgagcctcgcgtacagtggtcaatgaatgaatgtttggcgcaaatcggcatccatcgtccagagcttcgtgatcgtgccattgccattggtgagcgcctggaagttctcaaagattatccgacccctccaaattgcacctcgccttttgctccgatttggatcgaagagatggttcgcaggaaaaaataaccgacctgttccctatcttt

SEQ ID NO: 2120 - protein, 231 aa, Corynebacterium glutamicum
MSQAAGKFKPMTSTLAESTLTSLKELEDPKILSVNERHGDDHAVNLTKLRAVAKELKKNQPLARELWATDDTAARLVALLICRPKEFDQSELDSMIHEARTPKVLDWLINYVVKKNPHWNDLRVLWLEDPAENVAAAGWALNTHAVITKPDALDDSEILDTIEAQMKTAEPRVQWSMNECLAQIGIHRPELRDRAIAIGERLEVLKDYPTPPNCTSPFAPIWIEEMVRRKK

SEQ ID NO: 2121 - DNA, 627 bp, Corynebacterium glutamicum
  CDS (101)..(604): RXA01176
gagctgtgcaccttgtgaccttttgtgacactgctcaatgctttacggctacgatgaacaacaaaccgacgttttcgacgctgtgaaggactaattgctagtgcgttatttttacgatactgagttcattgaagatgggcgcacgatcgaattggtctctattggaatcgtcgcagaagacggtcgcgagtattacgcagttagcacacagtttgattcctccaaggcgaacgcttgggtgcgcgccaacgtgttggacaaattgcctaatccttcctccaaagtgtggaaatctgcagacactataaagcgcgaagtttatgagtttctcacctccaccggaccaacccctgaactgtgggcctgggtgggcgcatatgaccacgtgttgttggcacaaatgtggggcgatatggcggggcttcctcgggagatccctcgttttacccgcgagcttcgccagtattgggacatggctggccgcccaacgctgccagagctgccgaacggcaaccacgatgcgttgattgatgcgcgtcataatttagccaagttcaaagtgtgcatggcagcgctgcctttgggtaaaagggatcgcgtctcttagtcgatctgctcccattccat

SEQ ID NO: 2122 - protein, 168 aa, Corynebacterium glutamicum
VRYFYDTEFIEDGRTIELVSIGIVAEDGREYYAVSTQFDSSKANAWVRANVLDKLPNPSSKVWKSADTIKREVYEFLTSTGPTPELWAWVGAYDHVLLAQMWGDMAGLPREIPRFTRELRQYWDMAGRPTLPELPNGNHDALIDARHNLAKFKVCMAALPLGKRDRVS

SEQ ID NO: 2123 - DNA, 2109 bp, Corynebacterium glutamicum
  CDS (101)..(2086): RXA01177
tgttcatcgtagccgtaaagcattgagcagtgtcacaaaaggtcacaaggtgcacagctcagttccttaaaaaccgctggatacggatacactatttttcatgcacggtgaaaaacttgtggatggcactgagggaaatctcagtcaattccaatggcgcgatatggctacaaatcagacgctgagaaaagcactgttagtgctttctaccatcgctctactcttgactttatggccttcaattttcaatgttcgggccatcgagtcttttgttttcttcttccatattgatactgacgtgtaccgcgccggtgctaatgcattcttgcatggcgagaatctgtatacccaggactaccaagttggtagcattcaacttcccttcacgtacccaccgatttctgctgcgctgtttgttccacttgcaatccttgcaagcagtgtagccggaatagcattaacgcttatttccacggtgttgctgtggtggagcgtagctatcgtcttgcgccgagtgctcaagggtctcacggatgctgattccaggtttgtgtcctatttgattctgcctatggcattgtccacggaacctgtattccagaccctgcagtttggccaggtcaacatcattttgatggcgctggttctcatggataccttcaccaaaaagccctggttgccacgtggtttttggattggtttggcggcatccatcaagctgacccccgcagtctttggcctttacttcctagtgaagaaggactggaagggcgctggagtagcaattgcttctggcgtaggtttttccgccttggcgtttatcctctcaccttcaagttccaagatttactggactgaaacactcaacgacccttctcgcatcggcaacctatcttatattgctaaccaatctgtgcgtggaacgctcagccgaatgatgcatgaacagcaggatctcgtcgaaaagctttggcttgtggcagttgtcttgtgccttgccgctgtcgccgtcgccatgtggcgcgtggtacgcgccggcaacccgtacggcgccgtcatgctcaactcgttgattgctctgctgtgctcccctgtttcatggtctcaccactgggtatggctgattccaatcgctattggtttgggggcaagtgcgtggaaccagcggcggactgctccaggaattgccgcgacggctggagtcttggcgcttctgaccacgattccgatgttcatcacaacattttggaacatgccatacgattcagagtcttacccattttggccattgattctgcagccgtcgggcaacgcgtatgtagtagtggtcatcgctattttgatcgtcgcgattgtgaatccaacagttttgggcagtggcaataaagctgtttcaggccaggcagagaagaagtcctcccctgcgttgcttgttgttttagcgattgccattttctacctctttgccaatatttggtttaagggaaacaatcaaaacaaagcgctcattcagtacccactgcagactatggaaggtcgcggtctcactgacttcggcgagcttatttttgaattcgcggcttcctccaaccagcttgtttccctctggataatcggcgccctcaacgccatcgcattggctattaccctgtggttcctccttcagcgttttgctgggaagaagagctcctggctgatttatctcagcaccgtggctgttgcgctgatgatgttctcagtgcaggatgccttgcagtttggttcgctgactctcgttgcactcgcattgatcactgttgatgtgttgagtgtcagagagattggccgccgcgggctgctcacaggacttgcagcagccctgtttggatggccaattctgattgttatcggattcctcattcaccgacgttatgcagcaacaatcacaaccactgtcaccgcagctgtgctgtggatcttaggaattctgctcaatccagacgccttcaacctcaacctgctgcgtcaatggttcaacgggcgcgatggtcgggacaatttgtccttctatgctttccttgccaggtgggtcagcgaatccccagcatgatgttcgtatggttcatcgtc

SEQ ID NO: 2124 - protein, 662 aa, Corynebacterium glutamicum
MHGEKLVDGTEGNLSQFQWRDMATNQTLRKALLVLSTIALLLTLWPSIFNVRAIESFVFFFHIDTDVYRAGANAFLHGENLYTQDYQVGSIQLPFTYPPISAALFVPLAILASSVAGIALTLISTVLLWWSVAIVLRRVLKGLTDADSRFVSYLILPMALSTEPVFQTLQFGQVNIILMALVLMDTFTKKPWLPRGFWIGLAASIKLTPAVFGLYFLVKKDWKGAGVAIASGVGFSALAFILSPSSSKIYWTETLNDPSRIGNLSYIANQSVRGTLSRMMHEQQDLVEKLWLVAVVLCLAAVAVAMWRVVRAGNPYGAVMLNSLIALLCSPVSWSHHWVWLIPIAIGLGASAWNQRRTAPGIAATAGVLALLTTIPMFITTFWNMPYDSESYPFWPLILQPSGNAYVVVVIAILIVAIVNPTVLGSGNKAVSGQAEKKSSPALLVVLAIAIFYLFANIWFKGNNQNKALIQYPLQTMEGRGLTDFGELIFEFAASSNQLVSLWIIGALNAIALAITLWFLLQRFAGKKSSWLIYLSTVAVALMMFSVQDALQFGSLTLVALALITVDVLSVREIGRRGLLTGLAAALFGWPILIVIGFLIHRRYAATITTTVTAAVLWILGILLNPDAFNLNLLRQWFNGRDGRDNLSFYAFLARWVSESPA

SEQ ID NO: 2125 - DNA, 573 bp, Corynebacterium glutamicum
  CDS (101)..(550): RXA01178
tcaacctcaacctgctgcgtcaatggttcaacgggcgcgatggtcgggacaatttgtccttctatgctttccttgccaggtgggtcagcgaatccccagcatgatgttcgtatggttcatcgtcgccctaggacttggtgcctgggcaatccaccgcacctggtcacatggattcaaggacctctccgttgcactgagcatcgcactaccaaccttggtgctccccatagtggaactccaccacctcgtgctacttcttccactgatcgcagtgttgcttcgtcaaggacgcgtggcaatttcctacctcatcggatttatctacctagtctcatggactccgcaacacctgtcctactccacggtattcccacttaatgatccagcaccagaagggtacgtcgcccactttggatggtatttactcgttgaaccaatggcggtagcaccggcagctataatcctcggagcatttattgcctgtgctgcaaccacacctaaaacaagtcagctcgtgcaggtcgacaagtcaagcgcggaaaacaccaagtaagccttacagtccgacagcct

SEQ ID NO: 2126 - protein, 150 aa, Corynebacterium glutamicum
MMFVWFIVALGLGAWAIHRTWSHGFKDLSVALSIALPTLVLPIVELHHLVLLLPLIAVLLRQGRVAISYLIGFIYLVSWTPQHLSYSTVFPLNDPAPEGYVAHFGWYLLVEPMAVAPAAIILGAFIACAATTPKTSQLVQVDKSSAENTK

SEQ ID NO: 2127 - DNA, 1589 bp, Corynebacterium glutamicum
  CDS (101)..(1573): RXA01184
taaaacacttctgaaactacagctgacgttgtggggaagaactattaaaggaaataaagcggcaatagtgatgatgtcgctgatatctttttacgccttgatgggtttgtttggtttcggcatctttttggctcttgggcttgggcaagaccacatgggcatccttgctggtgttgtctcggtcggcatggtggcttattgcattgctgcgtttatgtggccgtcaggtgaggggcagctggatccgactgcattttccaccatgccgctatcggcgaagcaattattgcctggattcgctatcggtacgctcctgcagtcacgggggattattgcggtgatttgtacggtggcgacatccattattgctgcggtgtttttacctgttggttcgtggccgatgatcgtgttcatgatggcggtatcgctggttactacgttgcttttgggtgagttgcttggggcgttgacctcgggttcttcttctagggtgagtaatgatcgccgtacagttcttacttccgttgtcttcatggtgtttgttgttggctataacatgctgattggcgcggatggaatgagtcgaatcgatgccattggggcttatacaaagtggacaccatttggggcgggtgcaggtgctattgaggcttttgctgttggtttgtggggtgaggcaggcctgttaacattgctggcttttgtttatgttgctgctggtttctggttatggtcacagctgattaatcgcgcgctcactgcgccgctggaccaaggtgggcaagggcaaagcgctaaagacagcgccggtgaaggcaagaaggttctctttctgccaggtattccttggtcagttggaggtgccattttctcgaggtcgctgcgttatatgttcagggactccaggttgttgggatcaatgattgtgttcccgcttcttggcgtgctgtttattttccagagcttcaccgttgagtttttcatgatctatgttgggttgatcatgatggcagtgttcgcaggatccgttgctaccaatgattttggctatgacggcccttcgttgtggctaaatatcgttgctggtgtcaaagcccgaacgttgttgatgcccaggcactgggcatcaatgctgccgggaagtgtgtcaattgtggtgtttatgatcatcaccattgtgctcgcggagaataagaccaccgctgtgctgatctgttttattggcctggggatctttatctccagtgcggctgtagcgttgttggtcaccacatttaatccgtatccgacttctaagccaggcacgagtccttggggcgatcgaagtggctattccggtgctgcgttcgtgggagcatttgccgcactgttactgggatggatcccgacgattcctactatcgcattgggtatctttggtctggttaccgatcagatgtggatgatcatcctcgcggaggtgctggccattattctcccagtagctgtgtacatcggcgttgctaaggtgtgtattcgcaaggtggagaaggatcttccggagatcttcgacaaggtgaaaactcacgtgaaatagaaaaatgcggggt

SEQ ID NO: 2128 - protein, 491 aa, Corynebacterium glutamicum
MGLFGFGIFLALGLGQDHMGILAGVVSVGMVAYCIAAFMWPSGEGQLDPTAFSTMPLSAKQLLPGFAIGTLLQSRGIIAVICTVATSIIAAVFLPVGSWPMIVFMMAVSLVTTLLLGELLGALTSGSSSRVSNDRRTVLTSVVFMVFVVGYNMLIGADGMSRIDAIGAYTKWTPFGAGAGAIEAFAVGLWGEAGLLTLLAFVYVAAGFWLWSQLINRALTAPLDQGGQGQSAKDSAGEGKKVLFLPGIPWSVGGAIFSRSLRYMFRDSRLLGSMIVFPLLGVLFIFQSFTVEFFMIYVGLIMMAVFAGSVATNDFGYDGPSLWLNIVAGVKARTLLMPRHWASMLPGSVSIVVFMIITIVLAENKTTAVLICFIGLGIFISSAAVALLVTTFNPYPTSKPGTSPWGDRSGYSGAAFVGAFAALLLGWIPTIPTIALGIFGLVTDQMWMIILAEVLAIILPVAVYIGVAKVCIRKVEKDLPEIFDKVKTHVK

SEQ ID NO: 2129 - DNA, 1221 bp, Corynebacterium glutamicum
  CDS (101)..(1198): RXA01186
ttgctcatacagccattgaactcgtagaatcaccgttccgccacccaaatcagcccaataagttcaacaattacataacatctgaaagaatagggacattatggctacacctgtaccactggtttttaacgcacctaagcgtggcatgcccccaacccactttgcggatcttaatgatgaggctcgcattgaggctcttaaagagctcggcttgcccaaattccgactcaatcagatcgctcgacactactatggtcgcctcgaggctgacccactcactatgacggacctgcctgaaggtgctcgtcaagaagtcaaggatgctctttttccaacgttgatgtctcctctgcgcgtcgtcgaaaccgatgacgatacaactcagaagacgttatggaagctccatgatggcactttgcttgagtctgttctcatgcgctattcagatcgctccacgctgtgtatttcttcgcaggctggttgcggcatggcgtgcccattctgtgcaactggtcagggcggtttggaccgtaacctttcaatcggtgagatcgtggatcaggttcgtaatgctgctgcaacgatgcagtcagagggcggtcgtctgtccaacattgtgttcatgggaatgggcgagcctctcgctaactacaagcgcgtggtgtcggctgttcgtcagatcacgcagccaagccctgcgggcttcggcatttcccagcgcagtgtgactgtctccaccgtgggcctcgctccagctatcaggaagcttgccgacgaagagatgtccgtaactttggcagtttccttgcacactccagacgatgagttgcgtgacactctcgtgccagtcaacaatcgttggcctgtcgctgaggtactggacgctgctcgttactacgcagataagtctggccgtcgcgtctccatcgagtatgcgctcattcgcgatgtgaatgaccaggattggcgcgcagatatgctgggcgagaagctgcataaggctttgggctcccgtgtgcacgtcaacttgattccattgaacccaactcctggttctaagtgggatgctgcaccaaaggctcgtcaggatgagtttgtgcgtcgtgtgatcgccaagggtgttccatgcactgtgcgtgataccaagggacaagaaatcgctgcggcttgtggacagcttgctgcggaggaatctgcttaagccctcaaagctcaaaagcc

SEQ ID NO: 2130 - protein, 366 aa, Corynebacterium glutamicum
MATPVPLVFNAPKRGMPPTHFADLNDEARIEALKELGLPKFRLNQIARHYYGRLEADPLTMTDLPEGARQEVKDALFPTLMSPLRVVETDDDTTQKTLWKLHDGTLLESVLMRYSDRSTLCISSQAGCGMACPFCATGQGGLDRNLSIGEIVDQVRNAAATMQSEGGRLSNIVFMGMGEPLANYKRVVSAVRQITQPSPAGFGISQRSVTVSTVGLAPAIRKLADEEMSVTLAVSLHTPDDELRDTLVPVNNRWPVAEVLDAARYYADKSGRRVSIEYALIRDVNDQDWRADMLGEKLHKALGSRVHVNLIPLNPTPGSKWDAAPKARQDEFVRRVIAKGVPCTVRDTKGQEIAAACGQLAAEESA

SEQ ID NO: 2131 - DNA, 1221 bp, Corynebacterium glutamicum; identical to SEQ ID NO: 2129
  CDS (101)..(1198): RXA01186

SEQ ID NO: 2132 - protein, 366 aa, Corynebacterium glutamicum; identical to SEQ ID NO: 2130

SEQ ID NO: 2133 - DNA, 573 bp, Corynebacterium glutamicum
  CDS (101)..(559): RXA01187
ctattctttcagatgttatgtaattgttgaacttattgggctgatttgggtggcggaacggtgattctacgagttcaatggctgtatgagcaacagacctgtggatccatttgagaccaacccaaacgaccttcccaccggtttagacccagcatacgaaggtaacagtgagttaaacccgcttggaggaaaaaatattcccgacgagcctgaggtgactgcaaacacacctgcagttcaagaagaacctgcttactcggagccagaaactgccgttgagtcgaagcgtcaggcgaagcagaacacaaagaagtccgaacctgttgtggctccaaaacaaacacttgccggtggcacgtgggtagctctcatcgtaggcgcacttttgctaatcctactgttggtcttcatcatgcagaaccaaaccaccgtagagcttaacctttttgcgtggaccttccaattcccagccggaatcggtttcctactagcagccattaccggtgcattgattatggcgcttggtggtggcgtgcgcatgtttgagtaccgtcgcagttaagaaaaatccgt

SEQ ID NO: 2134 - protein, 153 aa, Corynebacterium glutamicum
VDPFETNPNDLPTGLDPAYEGNSELNPLGGKNIPDEPEVTANTPAVQEEPAYSEPETAVESKRQAKQNTKKSEPVVAPKQTLAGGTWVALIVGALLLILLLVFIMQNQTTVELNLFAWTFQFPAGIGFLLAAITGALIMALGGGVRMFEYRRS

SEQ ID NO: 2135 - DNA, 570 bp, Corynebacterium glutamicum
  CDS (101)..(547): RXA01195
ggtttcgcgccaggcgacattgtgagtaggatcgtctaaaatcgttttcttatcgcaggaaggactcaaaaaggccgtggaatatttgacctggggtttggtgattgttgcagtgtcggcagttcttcttgctgcctggcggtttttcaccttacgttctcggggaaccactgtgattctgcgtgagttgccacaaagcggtgtgcatggctggcgccatggatcatttcgctacaacggcaacgacttggagtacttcaagctgcgctctttgtctcccatggctgaccttattttgaaccgcctttcagtaactttgcttgatcgtagagatccagctgctgatgaggcggtttttatgtctcaaggcttaaaaattctgcacattaaatccaaaaatgatcagattgaattagctttggacgcccacggggagatggcgtttactgcctggttggaagcagcaccagatgcgcgggcggagcattcattgaatccacgtgatttcaaccgctttcgagccagcaaagacacccgcaaaaaccgctaagtagacgtcattgttatggt

SEQ ID NO: 2136 - protein, 149 aa, Corynebacterium glutamicum
VIVAVSAVLLAAWRFFTLRSRGTTVILRELPQSGVHGWRHGSFRYNGNDLEYFKLRSLSPMADLILNRLSVTLLDRRDPAADEAVFMSQGLKILHIKSKNDQIELALDAHGEMAFTAWLEAAPDARAEHSLNPRDFNRFRASKDTRKNR

SEQ ID NO: 2137 - DNA, 813 bp, Corynebacterium glutamicum
  CDS (101)..(790): RXA01196
gggcggagcattcattgaatccacgtgatttcaaccgctttcgagccagcaaagacacccgcaaaaaccgctaagtagacgtcattgttatggtgggtgcatgcgtttagtcatcgcccgttgctcagttgattatgttggccgtttggaagctcatcttccgtccgccgatcgccttttgatggttaaggcggatggttctgtatccatccatgccgatgaccgtgcctataagccactgaactggatgacacctccatgttctttagttgaaactcccatcactgatgaagatggtgaagcaacaggggaaagcctgtgggtggtggaaaacaaaaagggcgagcagcttcgaattactgtggaagaaattcattcggaacaaaacttcgatctaggccaagacccaggtttggtgaaagacggagtggaagatcatctccaagagcttcttgcagagcacatcactacgttgggtgatgggtacacattgattcgtcgggagtatccaacagctattgggcctgtcgatattttgtgtcgcaactctgacggcgagactgtcgctgtggagatcaagcgtcgtggtggcatcgacggcgttgagcagttgaccaggtatttggaattgctcaaccgtgatgaattgctcaagcctgttcatggagtgtttgcagcccaggagattaagcctcaggcaaagactctcgcggaggatcgtggcatcaagtgcgtgacgttggattatcaagcgcttcgtggcattgagtccaatgagctgacattgttctaagaacatgggccgaaaaaata

SEQ ID NO: 2138 - protein, 230 aa, Corynebacterium glutamicum
MRLVIARCSVDYVGRLEAHLPSADRLLMVKADGSVSIHADDRAYKPLNWMTPPCSLVETPITDEDGEATGESLWVVENKKGEQLRITVEEIHSEQNFDLGQDPGLVKDGVEDHLQELLAEHITTLGDGYTLIRREYPTAIGPVDILCRNSDGETVAVEIKRRGGIDGVEQLTRYLELLNRDELLKPVHGVFAAQEIKPQAKTLAEDRGIKCVTLDYQALRGIESNELTLF

SEQ ID NO: 2139 - DNA, 576 bp, Corynebacterium glutamicum
  CDS (101)..(553): RXA01197
agcaacaatcatatctgccaccctaccttggggttggcatgtgatgactagcttgcccaatcctcaatattcccccacctgctatgcctaaaattaagccatgtctaccgaacagtctttgaatatcccccacgaatacgtcatctgcctcgatcatgttggcatcgccgtccctgacctcgaggaagccatcgaattttaccgttccgcattcggctgggtaaaccaccaccaagaaatcaatgaggaacaaggcatttcagaggccatgatcggccccaaagacattaaaagcacagaaggcatgattcagctcatcgcgccgctcaacgaggactccacaatcgccaaattcctcgaaaagaaaggtcccggcatccagcaaatgtgcctgcgcaccaacaacatcgatgcgctctccgagcacctgcgccgccaaggcgtgcgcctgctctaccccgaacccaaaaacggcaccggcggtgcccgcatcaacttcctgcaccccaaagacgcgggcggcgtgctgctcgagatcacgcagcctcaaagctaattgcttatcgacgctcccag

SEQ ID NO: 2140 - protein, 151 aa, Corynebacterium glutamicum
MSTEQSLNIPHEYVICLDHVGIAVPDLEEAIEFYRSAFGWVNHHQEINEEQGISEAMIGPKDIKSTEGMIQLIAPLNEDSTIAKFLEKKGPGIQQMCLRTNNIDALSEHLRRQGVRLLYPEPKNGTGGARINFLHPKDAGGVLLEITQPQS

SEQ ID NO: 2141 - DNA, 426 bp, Corynebacterium glutamicum
  CDS (101)..(403): RXA01198
ttcggtagacatggcttaattttaggcatagcaggtgggggaatattgaggattgggcaagctagtcatcacatgccaaccccaaggtagggtggcagatatgattgttgctttttctgtagccccgactgttactgataatccagatgctgagatggccgatgcggtcacggaggcgattcgaatcgtccgcgcatcgggtctgcctaatgaaactaacgcgatgttcacgctcattgagggggagtgggatgaggtgatggcggtgattaaggaggccactgaggcgatctctagggtatctccgcgtacatcgttggtaattaaggctgatattcgtccgggacacactggccaattgacgaggaaggtggaggcggtggaggaacgcctagctagggattagctttgtacttaaacttgttg

SEQ ID NO: 2142 - protein, 101 aa, Corynebacterium glutamicum
MIVAFSVAPTVTDNPDAEMADAVTEAIRIVRASGLPNETNAMFTLIEGEWDEVMAVIKEATEAISRVSPRTSLVIKADIRPGHTGQLTRKVEAVEERLARD

SEQ ID NO: 2143 - DNA, 771 bp, Corynebacterium glutamicum
  CDS (101)..(748): RXA01207
cttcatgatctcaccggcagagcgcgttttgttacagcgcgtaaactgtgactttgaaaaatttttgaacaatccgtacaccaacttcaggagaaaaacagtgagcagaatctatgactgtgccgaccaagactcccgtgcagcaggcctaaaggcggctgtcgatgcagtcaaagccggtcagctcgttgtccttcccacggataccctttatggactcggctgcgacgctttcaacaacgaggcagtagccaaccttctggccaccaaacaccgtggccccgatatgcccgttccagtgctcgtcggcagctgggacaccattcaaggacttgtgcactcctattctgcgcaggcaaaagcgcttgtggaggcgttctggcctggtggactgtccatcatcgttccgcaggcaccaagccttccgtggaaccttggcgatacccgtggcaccgtaatgctgcgcatgccactgcacccagttgccattgaattgctgcgccaaaccggaccaatggctgtctcctccgccaacatctccggacatactcctccaaccaccgtgctggaggctcgtcagcagctcaaccaaaatgtcgctgtctacctcgatggtggcgaatgcgcgctggccaccccttcaaccatcgtggatatttcaggccccgcaccaaagattttgcgtgagggtgccatcagcgcagaacgcgttggcgaagtacttggagtgtcggcagaaagcctgcgctaaatgggagtcggtttcgcggg

SEQ ID NO: 2144 - protein, 216 aa, Corynebacterium glutamicum
VSRIYDCADQDSRAAGLKAAVDAVKAGQLVVLPTDTLYGLGCDAFNNEAVANLLATKHRGPDMPVPVLVGSWDTIQGLVHSYSAQAKALVEAFWPGGLSIIVPQAPSLPWNLGDTRGTVMLRMPLHPVAIELLRQTGPMAVSSANISGHTPPTTVLEARQQLNQNVAVYLDGGECALATPSTIVDISGPAPKILREGAISAERVGEVLGVSAESLR

SEQ ID NO: 2145 - DNA, 1350 bp, Corynebacterium glutamicum
  CDS (101)..(1327): RXA01213
aactctggcaacaacatgcgccttcactccctcaaacaaattttcataaacaccccacatcatatcaaccaaacggtgtagttcttctaagctttcacccatgacaaatcccacagaggagcgcaacgcacgccgcctcatttgggccaacggcctgcaaaacatcggcgatcaaatcgttgccgccaaaacagtcctgccctggttgctgcaagccgctggcgcgccgggctttttgctggcgcttctggttccaatccgcgaagccggatcgatgctgccgcaagctgccattactggctgggtgctgaggcagacgtcgagaagcaaagtctgggtgattggctcgaacggccagttcgtctcggcgctgggtatcggcgtggctgcgctgtttttgcgtgggtgggcgctgggcatcacggtgatcgtgctgcttgcggcgctgtcgctgtttcgatcgatgtgttcgattgcatcgaaggatgttcagggcaaggtgatttccaagggcaagcgtgggctggtaacgggccgcgcgacggtgattggcggtgtgatgggcctggttgcaggcctggcgatcgctattttcttgggctcgcattccccgacgagggtgctggccgcagtggtgatcgcgagctcgtttagctggctgtttgcctccattgttttcgcgcgcatcgaatacgcgaagccagcgactccaaaaaacgcgccttccgcaaacccgtgggtgcgtcgctgcatcgccgcattaaaagatgataaagcttttcgacgtttcgttctggttcgctcaatgatgctggtgacagcactctccacggctttcatcgtcgcactcgccgctgaatccggaaacagcatcgactccttgggattcttcctcatcgcctccggcttggcgtccatggttggtggccgaatctctggaatctggtcggatcattcctccaaaaacgtcatggcgggcggtgccctattcggttccatcgtgttaatcctcgtggtgctcagctccgcgtttgcacccgcgcagatcaacacgctggtgttcccgttgagtttcttcctcatcaccttggcccacaccgccatccgcgtggcccgcaaaacttatgtaatggacatggctgaaggtgatcagcgcacccgctatgttgccgacgccaacacactaatgggtgtagttttgctcattgttggcgcattatctggcttcattgcaattttcggaaacgaagccgcactgctcttcttggcggcaattggcctgcttggaaccattagcgcccgtggcctcaaggaagtatccgccggatagttttacaacttttccaccca

SEQ ID NO: 2146 - protein, 409 aa, Corynebacterium glutamicum
MTNPTEERNARRLIWANGLQNIGDQIVAAKTVLPWLLQAAGAPGFLLALLVPIREAGSMLPQAAITGWVLRQTSRSKVWVIGSNGQFVSALGIGVAALFLRGWALGITVIVLLAALSLFRSMCSIASKDVQGKVISKGKRGLVTGRATVIGGVMGLVAGLAIAIFLGSHSPTRVLAAVVIASSFSWLFASIVFARIEYAKPATPKNAPSANPWVRRCIAALKDDKAFRRFVLVRSMMLVTALSTAFIVALAAESGNSIDSLGFFLIASGLASMVGGRISGIWSDHSSKNVMAGGALFGSIVLILVVLSSAFAPAQINTLVFPLSFFLITLAHTAIRVARKTYVMDMAEGDQRTRYVADANTLMGVVLLIVGALSGFIAIFGNEAALLFLAAIGLLGTISARGLKEVSAG

SEQ ID NO: 2147 - DNA, 552 bp, Corynebacterium glutamicum
  CDS (101)..(529): RXA01218
ctaaatatgctagcacgatggccaaacctaatccaaaaaccggcagtatactgattggggtcacattagccaaaaggcactttgaggaagtggaactcctatggcacgacttcagcacgacatgattttcatcaacctaccagtatctgaccttgcagcatctaagcgtttttatgcaggtcttggcttcaaagaaaacaccgtcttcagtgatgagcacactgcatcttttgaggtcagtgacgccatcgtggtgatgcttctggaaaccgcgcgcttcagtgatttcactaagcgccccatcgtggagaagaacggctcccgcgaagtgctcaactgcctgtctgtatgttccaccgaggatgcggatgagttcgtgcgtcgcgcccaggaattcggaggcacgatcacccgtgagcttgcagcggaaggccccatgtacggcggagcttttgatgatccagatggacacggttgggagctgatgtacttcgatccagaggcactcgctcagatgatgcctgagggctaaatattcttcagggcttctcg

SEQ ID NO: 2148 - protein, 143 aa, Corynebacterium glutamicum
MARLQHDMIFINLPVSDLAASKRFYAGLGFKENTVFSDEHTASFEVSDAIVVMLLETARFSDFTKRPIVEKNGSREVLNCLSVCSTEDADEFVRRAQEFGGTITRELAAEGPMYGGAFDDPDGHGWELMYFDPEALAQMMPEG

SEQ ID NO: 2149 - DNA, 507 bp, Corynebacterium glutamicum
  CDS (101)..(484): RXA01234
agaaacaatagccagacccagaagagcagactggagagcttcgaggatttagtgctcctgtgcatttattcgggtcacttcaacgttgaaaagcataggaatgtggaagttcatgaagactcaatacgtatgtaccacttatttcatcgctgcacccgaggatgaagacgaggcgtaccaaacttatcgcagccgaatgaactctttggcagcattgaacggcgctgacgtagtttcagtggcagatggcctacggatggaagtagaccaggatatttggggaagccttgctgagcagtatcagattgagcaagaaggcctgtatcccactggtcacaacttgtactttgttgtcaccgtggtgaacctagatgattcagatgaggtttatgaccgaacaatggagcatctgattatggatgacccttatgtgcgagtggatcgtttcccaagcactgtccatgccagcacccagatcatgttgtagaaaaagaaaaagcaccaccc

SEQ ID NO: 2150 - protein, 128 aa, Corynebacterium glutamicum
MWKFMKTQYVCTTYFIAAPEDEDEAYQTYRSRMNSLAALNGADVVSVADGLRMEVDQDIWGSLAEQYQIEQEGLYPTGHNLYFVVTVVNLDDSDEVYDRTMEHLIMDDPYVRVDRFPSTVHASTQIML

SEQ ID NO: 2151 - DNA, 564 bp, Corynebacterium glutamicum
  CDS (101)..(541): RXA01237
aaaccaaaaatcacgacgcattaagtaacagagacttaaattaagaactccgaacaacaacttcggattgtttcatttttgaggatgaaagagcttttcaatgaacgtacagtttgaatcagacatggccgtccaaccaggaaacaccatggaagctaccgtcaccgacattcgtgatgccaagcgtaaaacaacccagcttgattcagtaacgccgtttaagaagaattgcccgagccgcaccttgctcgacaccatcagtgacaagtgggcggtgctgatcctgctcagcatggaaaatggtccacagcgcaatggtgaaatcaaagatcaggtccaaggaattaccccaaagatgctcacccagcgtcttggagtgttggtggaagacggactggtcactcgcacctcccacgcagttgtgccgcctcgtgtggattatcagctcaccgatctgggtgcttctgtcattgagccttgccgtgcgatgtattcctgggcagtggagaacattaagcaagtggaggcctaccgctcagcataagaacacttggcaaacctcac

SEQ ID NO: 2152 - protein, 147 aa, Corynebacterium glutamicum
MNVQFESDMAVQPGNTMEATVTDIRDAKRKTTQLDSVTPFKKNCPSRTLLDTISDKWAVLILLSMENGPQRNGEIKDQVQGITPKMLTQRLGVLVEDGLVTRTSHAVVPPRVDYQLTDLGASVIEPCRAMYSWAVENIKQVEAYRSA

SEQ ID NO: 2153 - DNA, 1437 bp, Corynebacterium glutamicum
  CDS (101)..(1414): RXA01267
tgctagttttaaagaggcgttgaggggtagtatcgcgtaagtttattagtggttagcgtagatttttcgaattgaagatgtttctgaaaggtatttagatatgtatgcagaaattaatggcggttttattccagagggcaccgtgcgggtaagcggcgcaaaaaactctgctactagacttctcgcggcggcactgctaaccgatgaggtggtgcatcttggtaatttcccaaccaagcttgtggatgttgaacataaaattcgctttattgaagagcttggcggaaaagtgcatgtcgaccatgatgagcaaattttagtagttgatgctaaggatcttgcagcgcgagaaatgactactgatgaactgaatattccgattcgaactacttatctcctagcagcagcgcagattgggcgtggggaaattgctcgagttccttttcctggggggtgtgctattggaggaggtcctgctggcggacgaggatatgatcttcatcttatggtctgggaacagctaggttgtaaaattcttgaaaaagatgatcacattgaagtaactgcaccccagggctttatcgggggagttattgactttcctatttctactgtgggaggcactgaaaacgcgttactatgcgcaagtattgcttcaggggatactaaaattgccaatgcttatattacccctgagataactgatcttattgaacttctgcgacgtatgggtgcggagatcactgtctacggtaccagccgtattcatgtaaagggtcgagcaggtcttttgcagggcgcatatatggacgtaatgccggatcgtattgaggcattgacgtggatcgtgtatggaattatttcaggcggaaggattaccgtcgaaggtgttccatttagctcgatggaagttccttttatccaccttgagaaggctggagtggatcttttccgtaattcaagttccgtatatattacaccagaatgcttgccttcaggctcagttcagccatttgagctagcgtgtggaactcaccccggagtaatttcggacatgcaggcactttttgttcttttaggattaaaaggtgcaggaacttcacgcgtctatgactatcgatacccagaaagaattgcatttgttgaggaattgacaaatctagtttcgggcgacaaattaagtgcagaggctggcaagatcactatccagggagatgctactttccggccaggatatgcgaactcaactgatctacgtggttctatggctgttgttttagcggcgctttgcgctgatggaaagtccacgattaataacgtccatatggcgttacgtgggtacaacgagttggataaaaaacttcgtttacttggtgcggatttaactatcagagaaggcgaagttccttcaccttaagaacgaaagttttacattga

SEQ ID NO: 2154 - protein, 438 aa, Corynebacterium glutamicum
MYAEINGGFIPEGTVRVSGAKNSATRLLAAALLTDEVVHLGNFPTKLVDVEHKIRFIEELGGKVHVDHDEQILVVDAKDLAAREMTTDELNIPIRTTYLLAAAQIGRGEIARVPFPGGCAIGGGPAGGRGYDLHLMVWEQLGCKILEKDDHIEVTAPQGFIGGVIDFPISTVGGTENALLCASIASGDTKIANAYITPEITDLIELLRRMGAEITVYGTSRIHVKGRAGLLQGAYMDVMPDRIEALTWIVYGIISGGRITVEGVPFSSMEVPFIHLEKAGVDLFRNSSSVYITPECLPSGSVQPFELACGTHPGVISDMQALFVLLGLKGAGTSRVYDYRYPERIAFVEELTNLVSGDKLSAEAGKITIQGDATFRPGYANSTDLRGSMAVVLAALCADGKSTINNVHMALRGYNELDKKLRLLGADLTIREGEVPSP

SEQ ID NO: 2155 - DNA, 963 bp, Corynebacterium glutamicum
  CDS (101)..(940): RXA01268
taccgatgttaaatcattatttaattgggtgctattgcttaggaaaattcgtccaagagtgctgatagttggaactccgaaagcttcattgctgggagtcgtggcagcacgaattgctcgagtgccacgaattgtctatgtggcacatgggctgcgctctgaaactgttttaggcttaaaaaagaagattctagtgtttttggaatatttgacccagttgtttgcacatcaaactttggctgtaagtcattctctgaagaaagcaattgaagatgcgcaccctcgttttaaaggaagagtgcaagtcttaggttatggcagtatgaatggagttgagcttgatcgctttagagttccatcccttgaagagaaattatctgctcgtaatgctttaaacctgcctagtaaatctgtcattgttggttttgtcggcagaataaataaagataagggaggagatcttctcgctgctcttacaaaacatgaggcttttacccgattgcgactgcatctcttaattattggtgaattggaagacgatgacttgcgagaagcattcattaaattagttaatgaagggcaggttacgattacaggatggattgatttccctgaagaaccattagctgcagttgatgttttgcttcacccaactcagcgagaaggtttaggtatgtctttgctggaagctcaggctatgggagtgcctgtattgacgaatgctgtgactggaacagttgatgcagtaacaagtggagaaggtggcttttttgccgatgacgattctgttgagtcctgggtttctaagattgatttattagtttccgatcctaagttaagagaccggatgggacgtgctggtcgccagtttgtgtcagctcgtttcaatcgtgatgatgtcgcagctcgtttcagtcatttcgtggaacaattcaaaaaatagggctcattcaatttcaatat

SEQ ID NO: 2156 - protein, 280 aa, Corynebacterium glutamicum
VAARIARVPRIVYVAHGLRSETVLGLKKKILVFLEYLTQLFAHQTLAVSHSLKKAIEDAHPRFKGRVQVLGYGSMNGVELDRFRVPSLEEKLSARNALNLPSKSVIVGFVGRINKDKGGDLLAALTKHEAFTRLRLHLLIIGELEDDDLREAFIKLVNEGQVTITGWIDFPEEPLAAVDVLLHPTQREGLGMSLLEAQAMGVPVLTNAVTGTVDAVTSGEGGFFADDDSVESWVSKIDLLVSDPKLRDRMGRAGRQFVSARFNRDDVAARFSHFVEQFKK

SEQ ID NO: 2157 - DNA, 1935 bp, Corynebacterium glutamicum
  CDS (101)..(1912): RXA01271
gtgaatccgatgccggacagatcgcagcaactcaatttggagattcagttttagcctgggttggcgaaacccaatttatttcaaaagatggtggacaaacatggcaataagcattggtaaagcaggacagaacttaaaagggtcagtgcctatcggaaaagtcctttttctcattgatgcccttgcctggatttctgcactatttatcggtgtggttttgcggtatgaattcaatctgagttctatcaactggagtgcgtttgcatggttcgggcttgctgcagttattttgcagtttgttctcggactttctctccatctttaccgcaagggattacgtcaccttttcggtagcttcgaagatacactaaacgtttctatctcggtcattgttgtcggtgttgtcctttggatcgcctcactatttgttggtcagcgttggaaaatctcacgcggtgtcatgctgctagttatcccgcttgctctcgtattcgtattggcagtgcgttatctcgcgcgtatgcgagttgagcgttttcgtcgtccggctgcggattccacaccagcattgattcttggtggtggatacatcggtaccaacctgatccagtggatgatgtccgatcctaagtcgcctttccgcccagtcggcgttattgatgataaccctgaattagcatgccaacgcgtacgtggtgtgccggttcttggcaagtttgatgatatcgcccaagttgcatcagacactggcgcagaacttcttatcgttgctattggtgatgccgactctgcacttttaaggcgtgtccaagataccgctaataaaaatggtctttcagtaaaggtaatgccggctattgaccgcgtcgtttctaagggcgttcgtggaaacgatttgcgtgatctctctattgaagatttgcttggacgtcaacctgttgaaaccaatgtttcagaaattactggctatctaacaggtaagcgtgttcttgttaccggtgcaggtgggtcaattggttcccagctatgtacggaaattgccaaatacggacctgctgagcttatgatgcttgatcgcgatgagactggtttgcagcaggttctgattaacgttgctggtaacggtttgttggatacggatgctgtggttcttgcggatatccgcgaagcagacgcgatgaaagagatttttctcaagcgtaaaccagaagttgtcttccatgcagcagcattaaagcacttgccaatgctggagcagtatccagatgagggctggaaaacaaacgttctaggaactcttaacgttcttgctgccgcagaagctgttggtgttgagactttcgtcaatatttccaccgataaggcagctaatccaaccagcgtcttagggcactcaaagcgagtcgctgaaaagctgactgcctggtatggacagaattccaccagcaagtacctatcggttcgatttggaaacgtcattggtagccgtggatcgatgctcccgactttcaccaggctaatcatggaagataaaccgctaacagtgacgcacccggatgtcactaggttcttcatgacaattcctgaagcttgccaattggtcctgcaagccggtggtattggacgttccggcgaggttctcatccttgacatgggtgagcctgtaagcatccttgaaattgcacagcgcatgatcgcaatgtccggtaaagatattgacatcgtgttcaccggccttcgcgagggcgaaaagatgcacgaagagctggttggtgatggtgaaaccgaagatcgtccattccactcaaagatttcgcatgcacatgcagaaagcctcgctcctaataatctcgatagagatcgatttatgcaacgtgctggaaaactagcttcaacagattcggagatcatctaaatgactaatgaacgaatttt

SEQ ID NO: 2158 - protein, 604 aa, Corynebacterium glutamicum
MAISIGKAGQNLKGSVPIGKVLFLIDALAWISALFIGVVLRYEFNLSSINWSAFAWFGLAAVILQFVLGLSLHLYRKGLRHLFGSFEDTLNVSISVIVVGVVLWIASLFVGQRWKISRGVMLLVIPLALVFVLAVRYLARMRVERFRRPAADSTPALILGGGYIGTNLIQWMMSDPKSPFRPVGVIDDNPELACQRVRGVPVLGKFDDIAQVASDTGAELLIVAIGDADSALLRRVQDTANKNGLSVKVMPAIDRVVSKGVRGNDLRDLSIEDLLGRQPVETNVSEITGYLTGKRVLVTGAGGSIGSQLCTEIAKYGPAELMMLDRDETGLQQVLINVAGNGLLDTDAVVLADIREADAMKEIFLKRKPEVVFHAAALKHLPMLEQYPDEGWKTNVLGTLNVLAAAEAVGVETFVNISTDKAANPTSVLGHSKRVAEKLTAWYGQNSTSKYLSVRFGNVIGSRGSMLPTFTRLIMEDKPLTVTHPDVTRFFMTIPEACQLVLQAGGIGRSGEVLILDMGEPVSILEIAQRMIAMSGKDIDIVFTGLREGEKMHEELVGDGETEDRPFHSKISHAHAESLAPNNLDRDRFMQRAGKLASTDSEII

SEQ ID NO: 2159 - DNA, 1557 bp, Corynebacterium glutamicum
  CDS (101)..(1534): RXA01273
gacctattcagcgctggattttttctggcattttcttggcagtcagtgagttgctaacgttctattggttaaaaattgatctgcaagaggactgcaaaatatggaattaagggaatacgcgacaatcctgatgaagaattgggtgttgatcgttatcgcatccattcttggaattgcagcgggcgctggtttttcccttctagctacaccggagtatcagtcacgtactcagttgtatgtatcggtgcggtcgggggctgggacaacctctgacatggttcagggtgctaacttttcgcgtcagattgtgaatagttatgttgatgtcattaagacgggtgttgttctagagccggttgttgatgagcttggtctggagttgacggctaaccagttgagttctcatatcagtgcggcttctcctgctgatactgcgttgatcaacatcactgcttctagtccttctcctcagcaggcggctgagatcgccaatgcagtgggggagagtttcaagaatgtgattcagactgaattggaaccagactccggcgatggcatgagcccgattaacctgactactactcaggtggctctggaaccatcttctccggtcagtcctaatgtgatgatgaatatcctcctcggcctacttgtaggtcttgcaataggtgttggtattgcagtgcttcgcgcggctttggatactcgtattcattccttgcgcgatattgaagaggttactgataagccacttttgggcggaatcattgcggattctgaagttgagaagcacccgttgatcattaagcacaagccgcatagtcctattgcggagtcctttcgtgcgttacgtactaacctgcagttccttaacgtcggcggctcatcttcagtatttgttatctcctctgctaatcctggtgagggtaagtcaaccacttctgtaaacctagctttggcgcttgcagaggccggctcccgtgtagcgctgatcgaagctgatcttcgcttgccacgagtgagcaagtacctcggagttgagggcaacgcaggtctgactgacattctcattggcaaggccgaggttaatgatgtgttgcagcgttggggtaggactcagttgtactatctcccggcagggcgcattccgccgaacccgagtgagttgcttggttcagctgagatggacaaggtcattgcggagcttgaggaaagctttgattatgtgatcatcgatgcccctccggcgttggcggttaccgatgctgcagttattggtcatggcaaggctggcatcctgattgcggtctccgcaggttctacaaagaagcctgagttggaagctacgctgtccacgcttgagaatgcggatgccaatgttgttggcgttgtcgctacgatgctcccgcctaagtctgtggctggttatggctacggaaattacggctacggcgacacctccaaaatcaatgcccctaagcccgacaacaccgaactaaccaccaccgatgcttccaaggccaacaatgagcaatagcttcactattctcactgtct

SEQ ID NO: 2160 - protein, 478 aa, Corynebacterium glutamicum
MELREYATILMKNWVLIVIASILGIAAGAGFSLLATPEYQSRTQLYVSVRSGAGTTSDMVQGANFSRQIVNSYVDVIKTGVVLEPVVDELGLELTANQLSSHISAASPADTALINITASSPSPQQAAEIANAVGESFKNVIQTELEPDSGDGMSPINLTTTQVALEPSSPVSPNVMMNILLGLLVGLAIGVGIAVLRAALDTRIHSLRDIEEVTDKPLLGGIIADSEVEKHPLIIKHKPHSPIAESFRALRTNLQFLNVGGSSSVFVISSANPGEGKSTTSVNLALALAEAGSRVALIEADLRLPRVSKYLGVEGNAGLTDILIGKAEVNDVLQRWGRTQLYYLPAGRIPPNPSELLGSAEMDKVIAELEESFDYVIIDAPPALAVTDAAVIGHGKAGILIAVSAGSTKKPELEATLSTLENADANVVGVVATMLPPKSVAGYGYGNYGYGDTSKINAPKPDNTELTTTDASKANNEQ

SEQ ID NO: 2161 - DNA, 903 bp, Corynebacterium glutamicum
  CDS (101)..(880): RXA01282
caggatgggtcggaacgttcgcgtcgtttgcggtgtggttctgggtcatttggtgggcagcggtaggaaatacaaaaagcccactctaagatggcagggtatggatgagctgctcaaacaggaagtcaaggatttcctcaccaccaggcgtgcacggattacgccggccgctgcgggactagaaacgcagccgtggagtgatcgtcgggtgccggggcttcggcgggaagaagtcgcggatctggcgggcatttctttggagtattacatccggtttgagcgcggaaatctcaagggtgcatcgcctgaaatattgcaatcgttggctaaggctctccaactgagcccaattgagcgcgaacaccttcacaatttggcttatcgcgccgaccatccgcgcaacctacctagtgcagagaccccaacggcacccctccaggacatcgttgatgcggtcacagataaaccggcgtggatccgcaacgagcagatggatattttggctacaaatcggctctgcgcggaactttacgccccgattttcaaggatctgcccgatcggcccaacactgcgcggcattgctttatcggcgcaacagcctccgagttctgggtggaccgggatcagttcagtgcggagttcgctgccaaactacgcctcgagtacgcccggcgccccagcgtgccaggtttaaaggagcttatcgacgagctccatcagaaaagttctgttttccgcgataattgggcgtctgctgatgttttgtcattcggctctggcatcaaacgtttcaggcacccaacactgggggagcgggtctatgaatacgagacgtttaatctcaatagtgcaccggggtatgtgttgagcatttacttttaggtggtggaggggcgcgtcga

SEQ ID NO: 2162 - protein, 260 aa, Corynebacterium glutamicum
MDELLKQEVKDFLTTRRARITPAAAGLETQPWSDRRVPGLRREEVADLAGISLEYYIRFERGNLKGASPEILQSLAKALQLSPIEREHLHNLAYRADHPRNLPSAETPTAPLQDIVDAVTDKPAWIRNEQMDILATNRLCAELYAPIFKDLPDRPNTARHCFIGATASEFWVDRDQFSAEFAAKLRLEYARRPSVPGLKELIDELHQKSSVFRDNWASADVLSFGSGIKRFRHPTLGERVYEYETFNLNSAPGYVLSIYF

SEQ ID NO: 2163 - DNA, 789 bp, Corynebacterium glutamicum
  CDS (101)..(766): RXA01294
atgaagggataccgctccttttcgggggtacagcactccagcaagactcattcggctcagttagagttcaccacaacgactcaaaaaagaaagtggcagcatgtctacgattcctgatgttttcaccagtgaagtgttccctgaaatcagtggcaccaaagaattccgtggcctgacttatatgttctttgatcaattcactttgcccaccgcagaacagcttgagcaagctaaagcagctggctggtcactgatcacctggggatggtggaatagcgacaccgatcttgaggatgtcgaattggaagacatcactaatgaaggcgacagcctaccaaaactcacggatgaattcgctgtgtcttcactgagcaccttcgatctaaattcccaaggtctgcccaatgatgatcgtgagccgcaaccaattgaagaagccgactcactagatgacatcttctccgaggaagagggctggggtctaatggcaatcaattgcccgaattggcaagtcccagcagcgtgtgaatggctcggctgcatgaatgttggtgaaccatttgaaatgtcacacgtacttagggtgtggcagaacagttggggcgtcgaggccctggcttttggtggtgaagaagacgacgcggatctgctgcttcgagtccctgaagaaagcgaagagctactgaaggctctcgcagtcgcttctgaccaagtcactacctacaagcatgaagatctgggattcttagctagtctttggtttgactaactacaatcaatgtcatgacc

SEQ ID NO: 2164 - protein, 222 aa, Corynebacterium glutamicum
MSTIPDVFTSEVFPEISGTKEFRGLTYMFFDQFTLPTAEQLEQAKAAGWSLITWGWWNSDTDLEDVELEDITNEGDSLPKLTDEFAVSSLSTFDLNSQGLPNDDREPQPIEEADSLDDIFSEEEGWGLMAINCPNWQVPAACEWLGCMNVGEPFEMSHVLRVWQNSWGVEALAFGGEEDDADLLLRVPEESEELLKALAVASDQVTTYKHEDLGFLASLWFD

SEQ ID NO: 2165 - DNA, 1098 bp, Corynebacterium glutamicum
  CDS (101)..(1075): RXA01295
tttctggtgttaccctcgggtaattgtaaaaaattcattgattaaaaacgatcagccaattggcatgctcagactccttgtgaagaaagtgacagtttcgatgaccgaaaatcttgataatgcgttgctatccatgcggatgaaacctgtacaaatggcgcttatgacactgggctacaaccatgacatggcggtgaccgattccggtatggaacttatagtgcgccgcccagggctgaccgtgaacttcaacttggattcggtcaccttgtgcatcgtcgctgatttcatgtggcatggctgtgtccctgcaaagaaacaggcagagtacctgcgggccgctaatgaattcaacaggccaacccgtgatctgcaggtggttttagatgaagctgattcaaagaacatgactgtgcgaggtcgtgaattcttcttctcaagcgtcggcgcaacgtgggaacagtcggcagagttcgtgcactactgcatgaatgatgtggcaacgactttcgtgtcttggtgcgaacaaatctggccgaagttttcccctgaacgcgtagagttcaacgcaactcctccagatgtggatttcgagttctctgaagatcaactcaaagaaggcaatcccttcgggctgattgacgaacccaccccgctggtttctttggatcgtatctaccaacaatacgaattaatgggtgcggatcaactcaagatgggggaggacttcgttgagtatctgcatatgggtcaacgtgtcagtgcatggttgaccgatggcaacaacggcagcgatcgaaaaaccctagcggtgtcttccggtacaggtgtgaaaatcaaaaacaagaagcaacttcaggaacttcttggactgtgcaacctgtactcgaaagaacatgtactggtcacagtatttgcggaagagatcgaaaacggcgcaaggtggggtattttcgccgaagcacgcatcgatctaccggcagggttaaacgatcatcagttgtgggtattcctcgccaactccagcaaatggactgcagaggtgtgcctgaccgtggcacaccgactgcagaactaaaggcagaacttaagcgttca

SEQ ID NO: 2166 - protein, 325 aa, Corynebacterium glutamicum
MTENLDNALLSMRMKPVQMALMTLGYNHDMAVTDSGMELIVRRPGLTVNFNLDSVTLCIVADFMWHGCVPAKKQAEYLRAANEFNRPTRDLQVVLDEADSKNMTVRGREFFFSSVGATWEQSAEFVHYCMNDVATTFVSWCEQIWPKFSPERVEFNATPPDVDFEFSEDQLKEGNPFGLIDEPTPLVSLDRIYQQYELMGADQLKMGEDFVEYLHMGQRVSAWLTDGNNGSDRKTLAVSSGTGVKIKNKKQLQELLGLCNLYSKEHVLVTVFAEEIENGARWGIFAEARIDLPAGLNDHQLWVFLANSSKWTAEVCLTVAHRLQN

SEQ ID NO: 2167 - DNA, 609 bp, Corynebacterium glutamicum
  CDS (101)..(586): RXA01304
atgcaggtaaacgaatttgtgcttatatcaacattcgtgattcggcaaaattaattaaactgaaaaaggggattaattacccccacttgaggagaaattgatgcccgcacagaacaaaaacctcccaggatccgtcatcgttgtgtctgatcggattaaatcgggagaaagaattgataaagcaggacccgtagcagtagaccttcttcaggaatcaggcgtggagatttccacattcaccgtcgtggaggagggctttgaacctgtccatcaagaattggttaaggcgttggcgcgccgggatcgcgtcatcatcaccatcggcggaacgggcgtggggcctagaaatcggacgccggaggccacagaaccgcacatcgatacgctactgccgggtctgatgacgcagattttgttctctggactgtccaataccgcgcaggcggggttatctcgggggctggtgggcttgagtgctcgcgattccacggccgcgctcatcgtcaacgcgccgagttcttccgggggcgtgcgcgacgcgctcggggtggtctgcccgcttttcggttccatttttgagcgtctttaaaagatttttgcttatcgacg

SEQ ID NO: 2168 - protein, 162 aa, Corynebacterium glutamicum
MPAQNKNLPGSVIVVSDRIKSGERIDKAGPVAVDLLQESGVEISTFTVVEEGFEPVHQELVKALARRDRVIITIGGTGVGPRNRTPEATEPHIDTLLPGLMTQILFSGLSNTAQAGLSRGLVGLSARDSTAALIVNAPSSSGGVRDALGVVCPLFGSIFERL

SEQ ID NO: 2169 - DNA, 450 bp, Corynebacterium glutamicum
  CDS (101)..(427): RXA01310
aaggaacgtgcgcgtgcagctttccgaggcaaagacgactagtctttaatccaagtaagtaccggttcagacagttaaaccagaaagacgagtgaacaccatgtcctccgcgaaaaagaaacccgcaccggagcgtatgcactacatcaagggctatgtacctgtggcgtatagctctccacactcatccctcgagcgcagcgcaacctggttgggcatgggattcctcctcactgctctggcaggcgttggcgcagtcctcttcgcagtcggcgcaaacagcgttggccagcagcaggaacactgggtcctctacagcatcatcggtgttgtattcgccgttgtctgcacagttttgggcaccgtcctgatcatcaagggccgagcaccttacaaccgttacgtcaaggaaaccggccgtacgcagtagtttctgtatgcaggttcttt

SEQ ID NO: 2170 - protein, 109 aa, Corynebacterium glutamicum
MSSAKKKPAPERMHYIKGYVPVAYSSPHSSLERSATWLGMGFLLTALAGVGAVLFAVGANSVGQQQEHWVLYSIIGVVFAVVCTVLGTVLIIKGRAPYNRYVKETGRTQ

SEQ ID NO: 2171 - DNA, 968 bp, Corynebacterium glutamicum
  CDS (1)..(945): RXA01313
gccctacgcctcatttcacagctgcttgcaccatctgcggcgttgaattttaagtccgagcgcaatgccgtcgacgtggcaaaacacatgctcgccagccaggcccaacaacgcggttccgcactcgttgcgctagacacccgctcggaaaacgccgacgccgccacggcattaagaaagtcactgctcatccgcagctggacgcagcgcggcacccaccaaatacttgccgccgaagacgtccgctggatgacgctactatgctccccacgcatcctggctgcttcagccaagcgccgctccagcctttcgcttgatagcgccgcagtccagcgcgcccgcgacgcactaacaaccgccgccgaaaaatcccccgtatccagaacccaggcctacgaaattttccgatccgtagacgttgaccccggcgagcacagaggccaacatttactccggcatttcggtggcgaaggtgacatcgtacaaggcccgcccatcggaacggaagattcctttgtgcttctcgattccatctgccccctttccctagcacttaacggcgacgaagcgctcacagagatgacccgtcgctacttccactcccgtggtgctgccactgtgaaagatctggtgtggtggaccggactgactgtgcgtgatgtaaagaaaggcatcgctgccgtgtcttcggatggactgattcactctgttgaaggcccgaatggtgaagaaatgtggatccctacctgggcagatgatgtcacagacgcagaggtttctgatgcactagcgttggaactaaccctccccgcctttgatgaatacctactttcctacaccgaccgcagccacgtcatggatcccgagcaccttttcagcatcggtcccggcaaaaacggtgtgttcaaacccttcaaagtagttcagggtgaggcactgccggtttagcccagcaaaatcttcacttg

SEQ ID NO: 2172 - protein, 315 aa, Corynebacterium glutamicum
ALRLISQLLAPSAALNFKSERNAVDVAKHMLASQAQQRGSALVALDTRSENADAATALRKSLLIRSWTQRGTHQILAAEDVRWMTLLCSPRILAASAKRRSSLSLDSAAVQRARDALTTAAEKSPVSRTQAYEIFRSVDVDPGEHRGQHLLRHFGGEGDIVQGPPIGTEDSFVLLDSICPLSLALNGDEALTEMTRRYFHSRGAATVKDLVWWTGLTVRDVKKGIAAVSSDGLIHSVEGPNGEEMWIPTWADDVTDAEVSDALALELTLPAFDEYLLSYTDRSHVMDPEHLFSIGPGKNGVFKPFKVVQGEALPV

SEQ ID NO: 2173 - DNA, 774 bp, Corynebacterium glutamicum
  CDS (101)..(751): RXA01315
catgtgcggttgtgtcctaagtcattgatgtcacctaacgcccctaagttcactcggtgcaatattgcactgagtgcaagtttacactaggtttacttcagtggatattgaagagcagccctcgttaagagaaatcaagcgccaaatgaccctggaagcgatagaagataacgcaaccaggctcattctggagcgtggcttcgacaatgtcacaatcgaagacatctgcgcagaggcagggatatccaagcgcacattctttaactacgtggagtccaaagagtctgtggccatcgggcacacagccaagctcccaacggatgaagaacgtgaagcattcctggctacgcgtcatgaaaatattatcgatactgtatttgacctggtaatcaacctctttggcaaccacgacaactccaagtctggagttgcaggcgacattatgcgtcgacgcaaagagatccgggtgaagcatccagaactggcagtgcaacatttcgccaggttccaccaagcacgcgaagggctagaacacctaattgttgagtacttcgaaaaatggccaggctcccaacatctagatgagcctgcagatcgagaagcaatcgccatagttggcctgctgatctcggtcatgcttcaaggttctcgtgaatggcacgacatgccacaaggcacgcaagctgatttccaagcctgctgtcgcaaagcaattaaaaatacttttcttcttagaggtggattttcagaatgacatcacaggtcaagccggac

SEQ ID NO: 2174 - protein, 217 aa, Corynebacterium glutamicum
VDIEEQPSLREIKRQMTLEAIEDNATRLILERGFDNVTIEDICAEAGISKRTFFNYVESKESVAIGHTAKLPTDEEREAFLATRHENIIDTVFDLVINLFGNHDNSKSGVAGDIMRRRKEIRVKHPELAVQHFARFHQAREGLEHLIVEYFEKWPGSQHLDEPADREAIAIVGLLISVMLQGSREWHDMPQGTQADFQACCRKAIKNTFLLRGGFSE

SEQ ID NO: 2175 - DNA, 426 bp, Corynebacterium glutamicum
  CDS (101)..(403): RXA01316
aaagcgcaaggctaagaaggattccccagaaccaggcgatgacgatatcatcgatggagaagtaattcctccgcagaattaaggaagtcggtttcaccccatggatatttccatgctcaacgtaataacgagctacaccatttgggccatttttgccatcatcggcatctgcggattcgttggtgccttcttggcagccaccaccagagaagatgcctttgaggttgctgatcgccaaaagaaaatggtgtgggtagcaatccttatcgcatccggatttgtcctcaccgcgctaggtccatcgattccgatcctgccatgggtcgccatcatcatgatcggcctgtactggtttgatgttcgcccgcaaatcaagagcatccttgaaggtgccggcggctggtaaaagctccctgaactgcgaaa

SEQ ID NO: 2176 - protein, 101 aa, Corynebacterium glutamicum
MDISMLNVITSYTIWAIFAIIGICGFVGAFLAATTREDAFEVADRQKKMVWVAILIASGFVLTALGPSIPILPWVAIIMIGLYWFDVRPQIKSILEGAGGW

SEQ ID NO: 2177 - DNA, 543 bp, Corynebacterium glutamicum
  CDS (101)..(520): RXA01317
atacatccgccttaatggcacaattgtaggtgcattagcaggactggccatttacgctatttcccatatcctcttcggagcttaactaggagtaaccatcatgtccgatgcaaaagacgattccatcttgtccaagtggagcaatgcagcttccgagctcagcggtgccgtcagtggagtagcgaagaagctccgtgaagaactctctgagaaggaaaccttcagcaagcttaaaaccgaagccagcgaagccgtcgatcaagcaaagtccggctcctacctagatgccggtaaggaattcgcccgcgacgccggatccatcatcaaagatgcagccaaaaccgtcaaaggtgccgtcagtgattccgataaaaacgacgtgaaatccgccttcggtaacgccgtggaagcttcccgcgacaagttcgatgacaccctcgaaaagcgcaaggctaagaaggattccccagaaccaggcgatgacgatatcatcgatggagaagtaattcctccgcagaattaaggaagtcggtttcaccccat

SEQ ID NO: 2178 - protein, 140 aa, Corynebacterium glutamicum
MSDAKDDSILSKWSNAASELSGAVSGVAKKLREELSEKETFSKLKTEASEAVDQAKSGSYLDAGKEFARDAGSIIKDAAKTVKGAVSDSDKNDVKSAFGNAVEASRDKFDDTLEKRKAKKDSPEPGDDDIIDGEVIPPQN

SEQ ID NO: 2179 - DNA, 1425 bp, Corynebacterium glutamicum
  CDS (101)..(1402): RXA01318
ggacgcgttccagagaaaagtgcaggcataacccctaaaataccctgatcttcccccgtgtcctgcccccgtgtccacccctgcgtacataataggacgcatgggaaaacatgaggttgctcagcagacggttccgggtccttcgccggaaatggaagcgcagcggcgtaaagagttgcgcaagcacaaggccattgccactggcctgttgatttttgctgccgctgtatattttctttgccgtttcgtggagacccgtccgggtgaaactgcagcgtgggtaggttttgtgcgcgctgcggcagaggccggaatgattggcgggttggccgactggttcgcggtcaccgcgctgttccgtcatccattgtggctgcctattccgcacactgcgattatcccgcgcaagaaagaccagttaggtgaggccttaagcgggtttgtgggggataacttcctaaatgcccagctcattacggaaaaagtctctcaggcgcggatcccagagcgcgccggggagtggctcgcccagccggaaaacggggagaaagtttcgcgcgaagtcggcaaattgaccgctaatattgtgcgcgcaatcgatccgtcagatgctgaagcggtgattaaatctgcggtgatcgacaagcttgcggaacccacctggggcccaccagctgggcggttgctggaacaactcctcgccgaaggcaaagccgaaccagttgtccaggaactcgcgcagtggctgcacaaaaaggcgttgggctccgagccgctgattgatcgcctgctcaacgagcgccgcccgatttgggcgccgaaattcactgcgcagctggtcagcggcaaagtctatgacgaggtcataaaattcactgaagccgtcgctgccgatcctaaccacgaggcccgcaaatcgctgcgccgattccttaataaattggcgcaagacctgcagcatgacccaggcatgattattaaagttgaagaaatcaaacgcgacatcatgggctccggcgccatcgcgcaagccgcgccaaccatctgggcgtcagcctccgagtcgctcattgaatccgcagaagatgagtcatcaattctgcgtcgcaaaattgccgaagcagctaccagctggggtcaaagattgcttgtcgacgactccctccggcattcactcgacacccggattaccggcgccgctgctttcctcgccgacaattacgcccccgaagtcaccggcattatctccgaaaccattgaacgatgggacgctgaagaagcttcagagaaaatcgaactcatggtgggcaaagacctccaatacatccgccttaatggcacaattgtaggtgcattagcaggactggccatttacgctatttcccatatcctcttcggagcttaactaggagtaaccatcatgtc

SEQ ID NO: 2180 - protein, 434 aa, Corynebacterium glutamicum
MGKHEVAQQTVPGPSPEMEAQRRKELRKHKAIATGLLIFAAAVYFLCRFVETRPGETAAWVGFVRAAAEAGMIGGLADWFAVTALFRHPLWLPIPHTAIIPRKKDQLGEALSGFVGDNFLNAQLITEKVSQARIPERAGEWLAQPENGEKVSREVGKLTANIVRAIDPSDAEAVIKSAVIDKLAEPTWGPPAGRLLEQLLAEGKAEPVVQELAQWLHKKALGSEPLIDRLLNERRPIWAPKFTAQLVSGKVYDEVIKFTEAVAADPNHEARKSLRRFLNKLAQDLQHDPGMIIKVEEIKRDIMGSGAIAQAAPTIWASASESLIESAEDESSILRRKIAEAATSWGQRLLVDDSLRHSLDTRITGAAAFLADNYAPEVTGIISETIERWDAEEASEKIELMVGKDLQYIRLNGTIVGALAGLAIYAISHILFGA

SEQ ID NO: 2181 - DNA, 579 bp, Corynebacterium glutamicum
  CDS (101)..(556): RXA01330
ccgtccgttttcctggtgggtcggccccgcatccagccctagaaatatcggagagctgctcgttgaggcccaatgaaatgcctccgaaacagaaacaggcatgtggaaagacttaaccgaaccgctgcccgaagcttgcgctgagggcttagagatccgggtggttaaatctcccgaagagctggcagattacgctgcagttctttctgcgaattggaatccacccgccgaaactgtgcagcgtttctataccgaagcagctgaatacgcactgagaaagaactcgcccgcactttatctggtgggttatgcgggcaaccgcgcagtgtgttctgcggaagcattcatacacgcgagcgtagttggaatctacaatatctccacccttgagcacaaacgccggcgtggctacggcggagccatcaccttagccacgttgcataccgcacgtaacgcagggtgtgacaccgccgtgttgcaagcttccgaagatggtgagcccgtttatcgcaaactaggattcaccgactgcggtcgatttactgaatactctttgtgattagttagggaccgtatgcg

SEQ ID NO: 2182 - protein, 152 aa, Corynebacterium glutamicum
MWKDLTEPLPEACAEGLEIRVVKSPEELADYAAVLSANWNPPAETVQRFYTEAAEYALRKNSPALYLVGYAGNRAVCSAEAFIHASVVGIYNISTLEHKRRRGYGGAITLATLHTARNAGCDTAVLQASEDGEPVYRKLGFTDCGRFTEYSL

SEQ ID NO: 2183 - DNA, 1128 bp, Corynebacterium glutamicum
  CDS (101)..(1105): RXA01333
cgccctttaaggcccgtaaagcactccacaacacttcacggcaggccgtaatttccctgtgaggtactttcttgcaagttgtagcgcaccgccgataccaatgcctggcgggtgctccggtaacatcgtccgcatgctgcctaaatcccggattttctccgcaatcttgctcggaattggtgtggcacttgtggtctggggtctggtggctccgcgctttgtgcacgctgatggccgtttgcctcttgatttggaggcgacgacgtacgttctccatgactctgacgctcagaccactattaattctgatccgttggccggtgtggtgactacgccggtgactcgtcagttgcattttgaggtgatggatcctgcgagtgctgatgatgccactattcgtattggtgattcgatgttgcgtggtaatcctgatactcagggttttgagcaggaacggctcctgtcagcgactgtgtcgagtttccgcattgatcgcacctctggtgaggttttgtccgatattgcgctgactaatcagttggcgagccctacggtgcagtattcggtggatggcatttggttgaagttcccaactgacgcgcaggagaccacttacaacgtggtggatccggtgctgaggtctgcgctgccggcggattttgtggagtccacggagatcgatggccgtgaggtgctgcattaccgtcaggtgattgataacgtgaatgtggcggagtatttcgcggatgccaacaacaccaccacgttgactaaagaggatggcggtaccacgacgggctatttttatcacaatgtgactcgtgatttttgggtggatcagcgtaccggtttggttgtcgatctagctgaaaatattgatgatttttacggcgaccgcagcggccagaagtacgaacagaaattgcttttcgacgcctccctcgacgatgcagctgtctctaagctggttgcacaggccgaaagcatccctgatggagatgtgagcaaaatcgcaaataccgtaggtattgtgatcggtgcggtattggctctcgtgggcctggccgggtgttttggggcgtttgggaagaaacgtcgagaagcttaacctgctgttcaaatagattt

SEQ ID NO: 2184 - protein, 335 aa, Corynebacterium glutamicum
MPGGCSGNIVRMLPKSRIFSAILLGIGVALVVWGLVAPRFVHADGRLPLDLEATTYVLHDSDAQTTINSDPLAGVVTTPVTRQLHFEVMDPASADDATIRIGDSMLRGNPDTQGFEQERLLSATVSSFRIDRTSGEVLSDIALTNQLASPTVQYSVDGIWLKFPTDAQETTYNVVDPVLRSALPADFVESTEIDGREVLHYRQVIDNVNVAEYFADANNTTTLTKEDGGTTTGYFYHNVTRDFWVDQRTGLVVDLAENIDDFYGDRSGQKYEQKLLFDASLDDAAVSKLVAQAESIPDGDVSKIANTVGIVIGAVLALVGLAGCFGAFGKKRREA

SEQ ID NO: 2185 - DNA, 726 bp, Corynebacterium glutamicum
  CDS (101)..(703): RXA01336
catggcatccgcctccaacgcgccgggcgggggagtccacggaatgcccggctggtgggcagcgcaagccgttttagcagatcacaggtagaattgcgacatggagcccaccgtaaaagccagcgcgcgccacaccatccacgtcaccgccgacacctggcgcatccgcctgagtgcctcagcccactcacaccccaacgacgcgtacgcgcgccgggctacggcaatttccgccataggcagcgtgcttatcgacgtccccctccaaggcgaacgcatctctgaatccactgcatacgacggccaaatcaacgccgactggaacgcagaagtcaccggcaccgatgtgaacatcgcacgcgacatcatctcccggctcgcagcggtgccagacgttcaagtcgacggcccgttgtggtccttgagtgacagtttggctgcagaggctgctgtggaggcattgcaaggtgctgccgacactgcgcggaacaccgcgaccgccatcgcagaatccctcggcgggcagctaggtgcacttctctacgcaacaaccgacacccacagctccacaccgataccagcacgcgcagaaatgatggcagcaaaagcctccataccaccgcgcacactcgacctagaactcgccccctctgacatcgaagtcaccaaagaaatcgccgtgacctttgaattccttgcaggctaaaccgcgatttggtatttcgg

SEQ ID NO: 2186 - protein, 201 aa, Corynebacterium glutamicum
MEPTVKASARHTIHVTADTWRIRLSASAHSHPNDAYARRATAISAIGSVLIDVPLQGERISESTAYDGQINADWNAEVTGTDVNIARDIISRLAAVPDVQVDGPLWSLSDSLAAEAAVEALQGAADTARNTATAIAESLGGQLGALLYATTDTHSSTPIPARAEMMAAKASIPPRTLDLELAPSDIEVTKEIAVTFEFLAG

SEQ ID NO: 2187 - DNA, 1635 bp, Corynebacterium glutamicum
  CDS (101)..(1612): RXA01342
gatgagtattctctccgaggcaacgaagttaatatgtccatgagggcgaagttgtagacaatatttggcccatatggataattgacaggagtttaacgccatggaaaccccaacccaagacatggatgtccgctggttatacacccaaagccagctcaaactccgcgaaattctccccacaaacaaaaccttcgatgtcatccaaatcagcgaactcgttgaccccaccgacttcatcaggcccaacagcgtggtcttatccgttggcatcgccttcgcagaaacgcccgacgggcttcgcgattgggcacaccgactcgccgacgcaggggtcatcgcgatcgggttcggctccggcctcaccttcccacaggttccgcaggcgcttatcgacgcctccctccaccttggcctcggcctctttgaagtcccccgtgaaattccatttatctcgatcacctccagcgtgcgtgatgagcaaacccgccgtgccggccgcctgcaacaagaactcctcctggaacaggaacggcttaactccatcgccatctccggtggcatcgaagccctgtgccgtgctgccgccgactatttgggtggtgcagtaaccatcgtggacagcgacggccgcgtggcttgctctattaccaccgatgacctagacgcactcccccaagctgtctcgcgcctgaacggatccagtcaagcactcacggatgccaccaactttggattcatccaccgcatgacccgctacggcgaccgccaccacgtgctctcagtccttatgcccacccgccccacagaccaacaccgcgcgctgatcagacactgcgcaggccttgccgatattttgctccaacgccccgaagccatgcgcgaccgagaaatcgaagtgcgatcacttgccatgtcactacttctgggtcgaagcgacgacctggccaccattcaccgcgtgttcgctgacatcactgatgcttccggaaatatccgccccatcctcatcaccggcaacacaccccaatcagtacgaaaagcactctccagtgtcgccaccgcactgtacaaacaggaacgagcactagctcatctacgcctcgccgaatccaccgaactcctcttccttcgcggaagccgcagcgtgcacaacatcgtgcaactttttggtactgccgcaagcggagttcgcctctgcattggtctgcccacccgagcggaaaacatcgataagaaactcatccgcgaactcactgccaccgcaaaaaccctacaacttggaacccacgccgaaccccgtgacggcaccttgctgtggctccaaaaccccgagctgcgcaaaatccttaagatccgatcccgcgacacctacgaccgtctcctcgaccacgaccgcaccaacaacaccgagctcgcccccaccttggtgtcttttactcagcacagcggacatataggcgacaccgccaaagaactgggcatccaccgccacaccgtgcgcacccgcatgatccgcattgaagagatctgcgaaatcgacctcaatgatccactgaccagagcggagctgctcttagtgatcgcaacgaaggagggagacgtcgaaaagcaataaaaagaccccatgcaaagcat

SEQ ID NO: 2188 - protein, 504 aa, Corynebacterium glutamicum
METPTQDMDVRWLYTQSQLKLREILPTNKTFDVIQISELVDPTDFIRPNSVVLSVGIAFAETPDGLRDWAHRLADAGVIAIGFGSGLTFPQVPQALIDASLHLGLGLFEVPREIPFISITSSVRDEQTRRAGRLQQELLLEQERLNSIAISGGIEALCRAAADYLGGAVTIVDSDGRVACSITTDDLDALPQAVSRLNGSSQALTDATNFGFIHRMTRYGDRHHVLSVLMPTRPTDQHRALIRHCAGLADILLQRPEAMRDREIEVRSLAMSLLLGRSDDLATIHRVFADITDASGNIRPILITGNTPQSVRKALSSVATALYKQERALAHLRLAESTELLFLRGSRSVHNIVQLFGTAASGVRLCIGLPTRAENIDKKLIRELTATAKTLQLGTHAEPRDGTLLWLQNPELRKILKIRSRDTYDRLLDHDRTNNTELAPTLVSFTQHSGHIGDTAKELGIHRHTVRTRMIRIEEICEIDLNDPLTRAELLLVIATKEGDVEKQ

SEQ ID NO: 2189 - DNA, 615 bp, Corynebacterium glutamicum
  CDS (101)..(592): RXA01348
atgggacaatgagcacgtgactctacgatctgcattacttgcgctactaagttccggaccattgactgggtatgacgcctcccagcgatttggggcctcggtgggctttgtgtggagtggttccgattcgcagatttatcccgaacttcgaaaaatggaagccgaagaactcctcgtgggatccgatgttccctggggctccaaaggcgccaccaaaaccgaatacgccttgagtgaaaaaggctgggaagcgctaagaaaagcgtggtacgagccagtaacctacggtcccaccagagatcctgccaggcttaaagccgcctattttgaggtcggtacaaatggcgatgcacgccgacatttaagggcgcacatcgctcattttgaacagcagaaaattcaatcagaatcaatgattgatgagctgaaagcaaaaactcatccaaccttggcacggcgacttgagcgctccccgaaaaaggagcacgagcgaatagtcgcgtttaaagtgcttgcctatgaggggcagattgcacgcgctcaggcagagattgaatgggcggaaaagggcttgaaactactcgataccctttagttttcgaacacgtccgtatc

SEQ ID NO: 2190 - protein, 164 aa, Corynebacterium glutamicum
VGFVWSGSDSQIYPELRKMEAEELLVGSDVPWGSKGATKTEYALSEKGWEALRKAWYEPVTYGPTRDPARLKAAYFEVGTNGDARRHLRAHIAHFEQQKIQSESMIDELKAKTHPTLARRLERSPKKEHERIVAFKVLAYEGQIARAQAEIEWAEKGLKLLDTL

SEQ ID NO: 2191 - DNA, 900 bp, Corynebacterium glutamicum
  CDS (101)..(877): RXA01349
agttgtcagctgggatttgccgatggtgttatctttgatatttaccttaaccccgtttctaattcacgttttctcgttacccgaaaggaattgatcgattatggcgacatcacgtcgagatgccgaaaacatagaccaggccggtagcgaattcattgaatctgattcaggacacaccgcaacccctgaagaggtagtagccaccgctctgacattttttgcagaggatggttttagcgaaaccaaattggagaaaatcgcgaaggcatctggcatgtccaagcgcatgatccactatcactttggcgataagaaaggcctgtacatcaaggctgtttcctacgcgttgcgattgctgcgcccagaggctgaagcgatgcaacttgattccgcggtaccagttgatggtgtccgcaaaatcgtcgaggctttatatacctgcatcaccaagcacccagaagcagtgcgcctgctattgatggaaaacctgcatagccaagacagcgtggattccaccgcggcatattccgatgaatccaatgtgctgctcaacctggataagctgctcatgcttggccaggatgccggcgccttccgtcctggaatctccgcagaagacgtactggttcttattagctccctggcctacttccgcgtatccaacaaggtcacgttgaagaacctctactcccttgatttggaatcagaggccaatattgaaggcatgaagcgcatcgtcgttgacacggtgctggcattcttgacctcaaatattcaaaattctggcaactccagctacctggttgttggtggcaagactgcagaaccagaaactgatgacagcgtctacagctttgatacggacgtgttcgaaaactaaagggtatcgagtagtttcaa

SEQ ID NO: 2192 - protein, 259 aa, Corynebacterium glutamicum
MATSRRDAENIDQAGSEFIESDSGHTATPEEVVATALTFFAEDGFSETKLEKIAKASGMSKRMIHYHFGDKKGLYIKAVSYALRLLRPEAEAMQLDSAVPVDGVRKIVEALYTCITKHPEAVRLLLMENLHSQDSVDSTAAYSDESNVLLNLDKLLMLGQDAGAFRPGISAEDVLVLISSLAYFRVSNKVTLKNLYSLDLESEANIEGMKRIVVDTVLAFLTSNIQNSGNSSYLVVGGKTAEPETDDSVYSFDTDVFEN

SEQ ID NO: 2193 - DNA, 426 bp, Corynebacterium glutamicum
  CDS (101)..(403): RXA01357
acggcgcaagtcccgagcacagatatagttatgcaaatgtggccaaggcacaccaagaatggctacacgctgcagataatgacacgacggaaggtggagcatgagcgctgaagaactcgacaactacgaagcagaggttgaactctctctttaccgcgaataccgcgacgtagtcagccagttttcctatgttgtagaaactgaacgtcgcttctacttagcaaatgcagtgcagcttattccacacaacagcggaaacgatgtctactacgaagtccgcatgtctgacgcctgggtatgggacatgtaccgctcagcacgcttcgttcgctacgtccgagtgatcacctacaaggacgtcaacatcgaagaattagataagcctgacatcatcatgcctgagtagttcttaggtttaaaatcgct

SEQ ID NO: 2194 - protein, 101 aa, Corynebacterium glutamicum
MSAEELDNYEAEVELSLYREYRDVVSQFSYVVETERRFYLANAVQLIPHNSGNDVYYEVRMSDAWVWDMYRSARFVRYVRVITYKDVNIEELDKPDIIMPE

SEQ ID NO: 2195 - DNA, 1305 bp, Corynebacterium glutamicum
  CDS (101)..(1282): RXA01359
gttggaccttgtgcgatttggatggggaacagcagcccaatcttgaccatattgcgcgagccatggagcttcggggcactacatacagtgaggtagcagcatgattgactcccgcttgctggcatgggcgtatctctcaaaagtggtggagggtcccaatgcacacctgcaaaagctcctgaaagaaggtcatgatgtagagcggatcgcatttggtattaaacaccgcgaagagtggattggcgaaggtctgctgaaaaacaccgattcccggtactcgattgataccgcgcaaactgatctggaaactatcgccaaactcggtgggcggctcatcacacctgaagacgacgaatggccgatggaagaattagaccatgcttttggatttgccgcttctggcatgagtgatcatgtgcgtacctatcaagatgatgcgctgccaccgcatgcgttgtggattaggggaggaaatctcagaacactcagtgcacagtccgtcacactcgtgggcaccagggcaataagccaatatggcacggaagtaactcgggaattcacccaaaaccttgtgtctcatcagtggacaatcatctcaggtggtgccttgggagttgatagcgtcgcccatagtgaagccgtacgtgcacaaggctccaccatcgcgatcgcagcatgcggattggatcgctcgtaccccagccacaatcgagatctgttcaaccagattgccaaatccggaaagggggcgttggtgagtgaatatccaccgggaactccacctcaacgccaccgctttctcactcgcaatcgtctcgttgctgctctatctcaaggaactgtcgtggtggaggcagcctggaggtcaggcgcgctaaacactttgagctggtgtgctggtttaggcaggattgctatggcggtccctgggccggtaaatactgctggatcacttgggtgccacgaaaggattcgaaacggcagcgcacaaatggtcaccagtgcggatgacgttcggtcacttctgggtgcagtgggtgcaatggatagccaaactcagtatgaattaaacttcgcggccactccagtacagggtttaaccagaaatgagctgcgagtttttgatgcgttagacgaccgaggagaggggagggaagcggcgagtatcgctaccgaagccgggttgaccttgcagttaacaattttccttctcattgcattgaacaagcgcggaatcgtgaaacgcgacggaactgcttggtcgagaaatgcggaaatgccataaaacctgggggttatataaaa

SEQ ID NO: 2196 - protein, 394 aa, Corynebacterium glutamicum
MIDSRLLAWAYLSKVVEGPNAHLQKLLKEGHDVERIAFGIKHREEWIGEGLLKNTDSRYSIDTAQTDLETIAKLGGRLITPEDDEWPMEELDHAFGFAASGMSDHVRTYQDDALPPHALWIRGGNLRTLSAQSVTLVGTRAISQYGTEVTREFTQNLVSHQWTIISGGALGVDSVAHSEAVRAQGSTIAIAACGLDRSYPSHNRDLFNQIAKSGKGALVSEYPPGTPPQRHRFLTRNRLVAALSQGTVVVEAAWRSGALNTLSWCAGLGRIAMAVPGPVNTAGSLGCHERIRNGSAQMVTSADDVRSLLGAVGAMDSQTQYELNFAATPVQGLTRNELRVFDALDDRGEGREAASIATEAGLTLQLTIFLLIALNKRGIVKRDGTAWSRNAEMP

SEQ ID NO: 2197 - DNA, 513 bp, Corynebacterium glutamicum
  CDS (101)..(490): RXA01366
atgcatgaaaacaaattctatgtgtgttgagctgccaaaaggggttggcgcgccgatgatgactgtccaaacctaaaccaaaggtctaaactttggcttcgtgagtcagtttcgtcgttgttcccgccctggttgtggcaagcctgccgtcgcaaccctcacctacgcatattcggattccactgcggtggttggtcctttggcgcctgcagcagagccccatagttgggatctgtgtgagcatcatgccgagcgtattactgcgccccttggttgggagatgctgcgggtgaacgacatcaaagtcgatgacgatgaggatctgacggctcttgctcaggctgttcgtgaggctggacgcactgtgagtggtctggttcctgaagacgaagtgggcggcaaccatccggtgaaccggagtgcgcggatcgcggaacagaaggttcaccgcaggggtcatctctatgttgtgcctgatcaggacgaatcataaggtttgctattcggattgga

SEQ ID NO: 2198 - protein, 130 aa, Corynebacterium glutamicum
VSQFRRCSRPGCGKPAVATLTYAYSDSTAVVGPLAPAAEPHSWDLCEHHAERITAPLGWEMLRVNDIKVDDDEDLTALAQAVREAGRTVSGLVPEDEVGGNHPVNRSARIAEQKVHRRGHLYVVPDQDES

SEQ ID NO: 2199 - DNA, 525 bp, Corynebacterium glutamicum
  CDS (101)..(502): RXA01367
cgcgccaaccccttttggcagctcaacacacatagaatttgttttcatgcatacgagaactttccgcaatcggcacggacgcggtctccgcggcccactcatgcccgtcgaagttccccgccacgcctctagacgccaagccttcgaccgcgcagtcttagaggcctactcccctctttacgggatttaccaaaaagagctcagcaatctagacatcgctgtcgataccgttcctcgcatgcgactcagcgccgaccttgccattctccccgatgaaatcaccgccgacggccccgttccacttggtcgcgtcatcccaccggcgatcgataccaagggaaaccccacgagagcgcgcatcgttattttcagaatgccgatcgagcaacgagtcaccaacgctgtggaacgccacgagctattgactcatgttctcacctctttggtggcgaactatctgaatattgatccacgagacatcgatccgggattccaggatctctagcgtggccggtgcaccatggg

SEQ ID NO: 2200 - protein, 134 aa, Corynebacterium glutamicum
MPVEVPRHASRRQAFDRAVLEAYSPLYGIYQKELSNLDIAVDTVPRMRLSADLAILPDEITADGPVPLGRVIPPAIDTKGNPTRARIVIFRMPIEQRVTNAVERHELLTHVLTSLVANYLNIDPRDIDPGFQDL

SEQ ID NO: 2201 - DNA, 474 bp, Corynebacterium glutamicum
  CDS (101)..(451): RXA01370
ctgtctgaatcgtgtgggcgttagatgaattgttataaaccggatgtttaacggaatttaatacgtgtcttattacgcggactagaaaggttttagggacatgggtgcatgggacgatgcaatcttgactgaggaagtcaacgttgattttctcgacgagatctcagaattagatactcaagacattcttgaggcgttggaagacgcatgtttgctggtggttaaccaggacaacgccactgaagacgaacacctcaacggtcaggcggctgcgacgatcgcggccatcatgtttggcgctccatattctgcgggccaggtgctggagaattacccatttatccgcgaactcgtcggtgagggctctgaagctcttcgcggtgctgcagcgcaggttttggaagaggcagatgtggaatatgacctcgaagcttatttagaggccctcaactagccctccactaaacagcttca

SEQ ID NO: 2202 - protein, 117 aa, Corynebacterium glutamicum
MGAWDDAILTEEVNVDFLDEISELDTQDILEALEDACLLVVNQDNATEDEHLNGQAAATIAAIMFGAPYSAGQVLENYPFIRELVGEGSEALRGAAAQVLEEADVEYDLEAYLEALN

SEQ ID NO: 2203 - DNA, 614 bp, Corynebacterium glutamicum
  CDS (1)..(591): RXA01372
caggacaccttcgtccttcccaccttgcccacggccgcaggcttgtcgcctgcccgcatcgtggcgtcgataagcactcttttagatcttttagaagcagaccccagcattatttccgaccgcttggaacacctcgccgactgcattgatgaggaagtggaatcgctatcgccggaacgtgacgaactagtcaatcccggccgaaaactgcgcgcatacgtagatcacgcacggatcgtgcataccggccgaactgatgtgggactcgcgattgccaacgttatcgccccaatctggacccgacgaggcctggtatcagccgtgctggattttcccgagctcatggaatcattgccggaactccgcggacccgagccaattaccgacgatatattccatgacccattcatagatgacgaacccggggtggtaccgtttagggctgttgtctgggccgaagaggaacccggaatccccgatgccatggcgcaaagctgcgacggacctagcaaaggggcgctgacacaagcactgcgtttgctggtgcgcggacagtcagccacgacctattccattgaagaaaaggacttgtaaatggagctattggaaggctc

SEQ ID NO: 2204 - protein, 197 aa, Corynebacterium glutamicum
QDTFVLPTLPTAAGLSPARIVASISTLLDLLEADPSIISDRLEHLADCIDEEVESLSPERDELVNPGRKLRAYVDHARIVHTGRTDVGLAIANVIAPIWTRRGLVSAVLDFPELMESLPELRGPEPITDDIFHDPFIDDEPGVVPFRAVVWAEEEPGIPDAMAQSCDGPSKGALTQALRLLVRGQSATTYSIEEKDL

SEQ ID NO: 2205 - DNA, 1278 bp, Corynebacterium glutamicum
  CDS (1)..(1278): RXA01378
catgtgtggatttcaccaggtgcgagcaatccgatcaaggatcgcctcttcccttggacattggtgaaggcttttctctcctcccctgcagccttgggcgaaacagtgtccaatcgcctcaaaaaggcctctgcaccagaagaaaaacgcgccctagaaaccctttcacaacttaattctgcgatcaccccgcagacctcacagaagtaccaatctctactgagctacctcggtgacatcggagtgaagaagaactccgatacccgcgtggtgattttctctgagcgtgtcgctactttgcactggctgcaggaaaacctcatccgtgatctcaagatgccacccaactctattgctgttatgcacggcggtctccccgaccaggagcaaatgcgcctggtggatgagtttaaaaagacggattctcccatccgcatcatgatcaccggcgatgttgcctcagaaggtgtgaacctgcatactctctgccacaacttggtgcactatgacatcccgtggtcactgatccgcattcagcagcgcaatggccgtattgatcgttatggtcaaacccacaacccttccatcgttaccttcttgctcgatcccgccgaggattccaaagtaggtgaagtccatgtgctggagaggctcatggagcgcgaacatgaggcgcactctttgctcggtgatgccgcatctctcatgggcaagcactctgagcgtttggaagaagaaaccatccgcgaagtcctgcgcggtgcccaaaactttaatgatgcagtggctgatccagcggaagtcctagaaaacccagcaggcctagatgatattgattggttgctagcccaaatcgcccaagccgatgccaaggcagaaacagaagcagaagcagaaacagaaaaccaaacagcaccagatgcagcttccaatagcacgcagcatgcacaacgccggttgtatgcacaggaaagctctttcctctatgactgcctcctcgaaggtttcaataacgtaccggaggattccatcaaccgcggtggcgtggggttcaaaaaacacgataatgacatcgtggagctcacccccaccgatgatctgcgccgtcgtctagatttcctcccgcaggattatgtggctgctcggaaagttaaggaagatctcctactagcttccacactgatgcgtggccaagaacgcctcaacgctgcgcgcactggtgaagatggcagtacctggccaagtgcccactatctaggccccctgcacccagtcact

SEQ ID NO: 2206 - protein, 426 aa, Corynebacterium glutamicum
HVWISPGASNPIKDRLFPWTLVKAFLSSPAALGETVSNRLKKASAPEEKRALETLSQLNSAITPQTSQKYQSLLSYLGDIGVKKNSDTRVVIFSERVATLHWLQENLIRDLKMPPNSIAVMHGGLPDQEQMRLVDEFKKTDSPIRIMITGDVASEGVNLHTLCHNLVHYDIPWSLIRIQQRNGRIDRYGQTHNPSIVTFLLDPAEDSKVGEVHVLERLMEREHEAHSLLGDAASLMGKHSERLEEETIREVLRGAQNFNDAVADPAEVLENPAGLDDIDWLLAQIAQADAKAETEAEAETENQTAPDAASNSTQHAQRRLYAQESSFLYDCLLEGFNNVPEDSINRGGVGFKKHDNDIVELTPTDDLRRRLDFLPQDYVAARKVKEDLLLASTLMRGQERLNAARTGEDGSTWPSAHYLGPLHPVT

SEQ ID NO: 2207 - DNA, 2039 bp, Corynebacterium glutamicum
  CDS (1)..(2016): RXA01380
tcgctgattttgggatgcgacaccaaggctcgcctggaggatctgtacctgccgttcaaaaaacggcgcaagacgaaggccgatatcgctagggaggcgggcctggaggggctcgtcgataagcttatcgacgccccgtccctcgacgccgcagcgcaggcagctgcatttacgactgagggctttgaggattccaaaaaagttttggatggcgctcgcgccattttgattgaccgcttcgcgctcgatgccgatttggtgggcgaggtgcgtgagcaaatgtatcgcgcgggttccatggcggcatcggtggtggcgggcaaggagcaggaaggcgcaaagttcaaggactactttgagttttccgaaccttttgacaagcttccatctcaccgaattttggcgctgctgcgcggtgaaaacgaaggtgtgctgagcctcaacctcgatgcgggcgacgacataatctacgaaggtttgatcgccgaccgattctccctggacacccacacttctagctggctggctgaggctgtgcgctggggttggcgcaccaaactgtatgtgtcctccggattggatgtgcgcatgcgtctgaaagaaaaagcagaggaaggcgcactcgatgtgtttgccaccaacctccgcgacgttctccttgcagctcccgctggtcagcgctccacaattggccttgacccgggattccgcaacggtgtgaaagtagctgtcgtggattccaccggtaaggatgttgccaccacgatcgtctacccacaccagccccaaaaccgctggaaggaagccgtatccgaactggctaacctgtgcgcgacccacggtgtggaactcatggcgatcggcaacggaaccgcctcgagggaaacggaaaaactcgccggcgaagtagctgacatgatcaaagccgcaggtggcacgcgaccaacccccgtggtggtctccgaatcgggcgcatccgtgtactcggcatcaccgatcgcagccgaagaattccccgacatggacgtctccctccgcggtgcagtttctatcgcgaggcgactccaggatccactggcggagctcgtcaagattgagcccaaagccatcggagtcggccagtaccaacacgatgtcaaccaggttgcacttgccaaaacccttgatggtgtcgtcgaagacgcagtaaacgcagtcggagttaacctcaacaccgcatccgcaccacttcttacccgagttgccggagtgacctccaccttggcaaacaatatcgtggcctaccgcaacgaaaacggtggattctcctcccgaaaagaactgaacaaagttcctcgcctgggacccaaagcctttgaacagtgtgctggcttcctccgcatttctggatccaccgaccctctcgacgcctccgctgttcaccccgaggcgtacccagttgttcgcaacattgcgaaagccacaggattggatgtctcgggactgatcggaaactctgcggtgctcaccaaattgaagcccgctgatttcgctgatgaacgattcggcatccccaccgtcaccgacatcatcgccgagctggataaacccggacgtgacccccgcccagaattcaaaaccgccagcttcaaagaaggcgtggagaaaatctccgacctcacacccggcatgatcctggaaggaactgtcaccaacgttgcggcgttcggcgcattcgttgacgtgggagtgcaccgagatggcctcgttcacgtttccgcgatgagcgacaaattcatctccaacccccacgaagttgttcgctctggtgaggtcgtgaaggtaaaggtcatggaagttgacgtcgaccgcaaacgcatcggcctttccctccgcttgaccgatgaacccggtgccccagctccgcaaaagcgcggaaaccgaccagccaaacagcagcgagctccgcaaaaacagtccgctaagcccgccacaggttccatggcagatgctttacgacgcgccggcctcggtggctaaggcaactttcaaaccaagcg

SEQ ID NO: 2208 - protein, 672 aa, Corynebacterium glutamicum
SLILGCDTKARLEDLYLPFKKRRKTKADIAREAGLEGLVDKLIDAPSLDAAAQAAAFTTEGFEDSKKVLDGARAILIDRFALDADLVGEVREQMYRAGSMAASVVAGKEQEGAKFKDYFEFSEPFDKLPSHRILALLRGENEGVLSLNLDAGDDIIYEGLIADRFSLDTHTSSWLAEAVRWGWRTKLYVSSGLDVRMRLKEKAEEGALDVFATNLRDVLLAAPAGQRSTIGLDPGFRNGVKVAVVDSTGKDVATTIVYPHQPQNRWKEAVSELANLCATHGVELMAIGNGTASRETEKLAGEVADMIKAAGGTRPTPVVVSESGASVYSASPIAAEEFPDMDVSLRGAVSIARRLQDPLAELVKIEPKAIGVGQYQHDVNQVALAKTLDGVVEDAVNAVGVNLNTASAPLLTRVAGVTSTLANNIVAYRNENGGFSSRKELNKVPRLGPKAFEQCAGFLRISGSTDPLDASAVHPEAYPVVRNIAKATGLDVSGLIGNSAVLTKLKPADFADERFGIPTVTDIIAELDKPGRDPRPEFKTASFKEGVEKISDLTPGMILEGTVTNVAAFGAFVDVGVHRDGLVHVSAMSDKFISNPHEVVRSGEVVKVKVMEVDVDRKRIGLSLRLTDEPGAPAPQKRGNRPAKQQRAPQKQSAKPATGSMADALRRAGLGG

SEQ ID NO: 2209 - DNA, 1839 bp, Corynebacterium glutamicum
  CDS (101)..(1816): RXA01384
actgtccctcactctgcgagcagccattgcgctatcggcagctacctgcaaggtgcgctggtgggaagcgtcgacaagcatctttaagtagcgttgatgtatgcgctcacttcaatcggtccttgacctgctgacttctaagtccaaagtggctaccaaaattgtggtggaacgaattgaaaagcatcctgttcatggattgggatggatgatgtatccgccatttcatccatggactgatgcttcgaccttgacgattgagcgaaacggaaccagtcggcgcgcgagtcagaatggcgttgcggttcttcatcagcatgagcaagttcaaactatcggtctagccagctattttatcgactccaagatttgggtaaacgagctggctggccttgatcgtatcaacatttctgagagtgaagttgctggtcgtgacgtattagttctgccgttatctgatctgactttaagcatcgatgcgaaatacggcgtggttttggctgcggaagacagcgatgaatcagtgcgcgcggtatccgtggagttcctggaccagtgggtagatgaagaagaacccccagcggaagaagtgcctaaatatacggaaaccagggaggaacttcctccacttgagattcctccggctccttccggaaatcgtaatctccgagttctgtgcacgtggggagcgatggaaggaattattcctgagtggaaacccggcgatcaagtttcactgtttttgtctttcgacctcgacgatccgccgttcgaacagctcaaaaccactcgtcgcgggtacaccgaacctggcgagatttatggaaaccagcgcagctataaatttcacgctgatggttggaacgctgttatttccgccaaagtgccactgcgcaccgaagaaaacctcaccggctacttcacccacagctcctacgcggacacgagccgccgcacgtcagcggtcatcaccgcagtctaccgccacggtaaggacgcaattatcgacgtgaccctcgacggtgcgaaacctcctagatatcaagaatccttggattggagcagcaccagtacctgtgacggtgaaacaatctggctgtccgataagagcttgcccttcgtccgcggtttcaatgtctccacaggcaagctagtacacgagatctccatacccaccttcaatgagatcgccctcgaatccggcaatagagcccgcgcagcgaaaaaactttgggaacttccagatcttaaagaggcaaccgaccctgtcccagcgatccccgcgggctggaaactacacaaaagattcgggaaaaacttccatatcgtaagcgctgacaacggaacctggaaacaaaccatccttaggatcaaacccttcaaagcaattgagcttgatcttggatacgccaagatttcgacgatttaccaatacggtgaacgaatttatctgcgttccgatcttcaccagatcacgtttaatcaggatcttgaaatcctcagtgtagaggtccacggaaatcccgatgcaggttattggccactttccgatcttccaccaggggattctccaacgctgggatttcctatcggatcactcatgatgttccacgaacaacaagatatctacgctttccacgatcctaaaacaacaaagcaactaacaactgtgaacttgcccaaaaggcagtttgaagtggaatatgcttctcagaacagaattgttatttcgctgaaaaatccagaaagccgcctcattgacaaactgttggtgtgggaaccacaaaccaggtggcgggaacaaaacctggagagctgagcacggtttgattaacgtcg

SEQ ID NO: 2210 - protein, 572 aa, Corynebacterium glutamicum
MRSLQSVLDLLTSKSKVATKIVVERIEKHPVHGLGWMMYPPFHPWTDASTLTIERNGTSRRASQNGVAVLHQHEQVQTIGLASYFIDSKIWVNELAGLDRINISESEVAGRDVLVLPLSDLTLSIDAKYGVVLAAEDSDESVRAVSVEFLDQWVDEEEPPAEEVPKYTETREELPPLEIPPAPSGNRNLRVLCTWGAMEGIIPEWKPGDQVSLFLSFDLDDPPFEQLKTTRRGYTEPGEIYGNQRSYKFHADGWNAVISAKVPLRTEENLTGYFTHSSYADTSRRTSAVITAVYRHGKDAIIDVTLDGAKPPRYQESLDWSSTSTCDGETIWLSDKSLPFVRGFNVSTGKLVHEISIPTFNEIALESGNRARAAKKLWELPDLKEATDPVPAIPAGWKLHKRFGKNFHIVSADNGTWKQTILRIKPFKAIELDLGYAKISTIYQYGERIYLRSDLHQITFNQDLEILSVEVHGNPDAGYWPLSDLPPGDSPTLGFPIGSLMMFHEQQDIYAFHDPKTTKQLTTVNLPKRQFEVEYASQNRIVISLKNPESRLIDKLLVWEPQTRWREQNLES

SEQ ID NO: 2211 - DNA, 381 bp, Corynebacterium glutamicum
  CDS (101)..(358): RXA01396
tcaccaacccacttaacttcgagaccttcgattccctcgtcgttccagttggttcttctgcaaccgctgagatccaggctcagcttcaacctcccgcgttttgaaggctttcaacaccaacttcgcagccactttggctaccggaaaggttggcgatatcaccaccaccgttttagttgcaggcgatgatgaagacgcaaagaacgctcttatcaccgacgtcaacgctggcggcctcgacgcccttgacgctggttccctcaagcgtgcacacgagcttgaagcagttggtttcctgcagctcacccttgcaggttccgagaagattggatggaccggcggattcggcctggtcaagtaacacccagcctcaaaagcact

SEQ ID NO: 2212 - protein, 86 aa, Corynebacterium glutamicum
LKAFNTNFAATLATGKVGDITTTVLVAGDDEDAKNALITDVNAGGLDALDAGSLKRAHELEAVGFLQLTLAGSEKIGWTGGFGLVK

SEQ ID NO: 2213 - DNA, 543 bp, Corynebacterium glutamicum
  CDS (101)..(520): RXA01397
tgagctgctaaaagtctcgcattaaaggactgcttcccttcgggggagcatttctttttaactaattacttgacacgtcaagtaattagggtctagtgttgtgttcatgatcaaagaactgctcaacaagctcttcggaaacaagaaggcttccccggcaatgacacaatctgaaaccatttcacacaaggagaacaacacaatgaccacttacaccatcttcggccgcggcaacatgggcaccgcaatcgcaggcgtcctcaccaagggtggtgcaactgtagaacacatcggttctgcagattctgacatcgcaaccatcaacggtgacgttgttatccttgctgttccttacccagcagtagagtccatcattgcaagccacaaggatgctctcgcaggcaagaccgttatcgatatcaccaacccacttaacttcgagaccttcgattccctcgtcgttccagttggttcttctgcaaccgctgagatccaggctcagcttcaacctcccgcgttttgaaggctttcaacaccaacttc

SEQ ID NO: 2214 - protein, 140 aa, Corynebacterium glutamicum
VFMIKELLNKLFGNKKASPAMTQSETISHKENNTMTTYTIFGRGNMGTAIAGVLTKGGATVEHIGSADSDIATINGDVVILAVPYPAVESIIASHKDALAGKTVIDITNPLNFETFDSLVVPVGSSATAEIQAQLQPPAF

SEQ ID NO: 2215 - DNA, 384 bp, Corynebacterium glutamicum
  CDS (101)..(361): RXA01401
tgccaaacggaaggtttaattggtctacatgtgtcagtctcatggcactataatagacctagtatctatagattgatagaaaataatttaggaagtttccatgaactctcccctacaacacagcgccttccccgtccccggcgcgcaactctccacctcatacagcgacgaacacggccaagccgtcatccaacttcacggcctcacctcctcccgccaacgcgaccgcctcctcgacctcgacctcggccgtggcctttccggcacgcgccttttgcgttacgacgcccgcggccacggcacctccaccggccgcgctgcctccaccgattatcagtgggacaccctagcgggtgacctttaatgcttctcgacgcccacttc

SEQ ID NO: 2216 - protein, 87 aa, Corynebacterium glutamicum
MNSPLQHSAFPVPGAQLSTSYSDEHGQAVIQLHGLTSSRQRDRLLDLDLGRGLSGTRLLRYDARGHGTSTGRAASTDYQWDTLAGDL

SEQ ID NO: 2217 - DNA, 597 bp, Corynebacterium glutamicum
  CDS (101)..(574): RXA01402
cgctgcctccaccgattatcagtgggacaccctagcgggtgacctttaatgcttctcgacgcccacttccccacgaacaagtccacggcgtcggcccctcatgggttgcgccaccctcctcaaagccgcggtgttaaaccccgaccgcttcagtggattcacactcatgctcccacccaccgcctgggaatcccgaaaagcccaagcctccgaatacctatcccgagcagaattcctagaaacccacggcatggacgccttcctcaacgccgaaaaactccacgcccaaccaccagcaaccgtaggaacccccgacacagtccccgacatttccgccgaactcctcccctgggcttaccgaggcgccgcccaaagcgacctcccctcaaagaaagaaatcgccaaaataacagcccccaccactattctgagctggaccgacgatcccggacaccccgtatccacggcaatcgagctaacccgcctcatgccaaacgcccaactgcgcattgccactaccccagcggaagtcgcgcggtggccacaacaccttcgcgatgacctgcagttggactaaaaaccttcattatctggttt

SEQ ID NO: 2218 - protein, 158 aa, Corynebacterium glutamicum
MGCATLLKAAVLNPDRFSGFTLMLPPTAWESRKAQASEYLSRAEFLETHGMDAFLNAEKLHAQPPATVGTPDTVPDISAELLPWAYRGAAQSDLPSKKEIAKITAPTTILSWTDDPGHPVSTAIELTRLMPNAQLRIATTPAEVARWPQHLRDDLQLD

SEQ ID NO: 2219 - DNA, 579 bp, Corynebacterium glutamicum
  CDS (101)..(556): RXA01405
aattagacgtctgtctctagggatgccgcatcccgccggcgctcctagagtccgtttgtaaaacctagaattccgaatacgttccgaatagggtgggggtatgagtaagatagttgatctgcgctatgggacccggcgttcctcggagttgagcaaacgctctgctgaagtctttgccgaagctgaagaacatcccattactgtgacacgtcgtgatggtgaagcgttggtattgatgtcgcagcgcgaagctgacgggcgagcccgcctgctggagttggctgcacagttaattactgtggccactgatcatcagggcacgttagccgaacgtatggcgaaagtattcccgtggatgctggccctgtcagtggcggatcgtgaggcgtgtgcccgtgagattcttgacgctgcacgagcatcgtttgcaaccgaacaacctcacctcgctcttactgaactgacctcatggaaagaaacagcagcagctgttgctgctggattgagtaacactgatctgcagtggtacgacgatccgcatctggtggagcgtccctaagcgtggctggaaagaaaagc

SEQ ID NO: 2220 - protein, 152 aa, Corynebacterium glutamicum
MSKIVDLRYGTRRSSELSKRSAEVFAEAEEHPITVTRRDGEALVLMSQREADGRARLLELAAQLITVATDHQGTLAERMAKVFPWMLALSVADREACAREILDAARASFATEQPHLALTELTSWKETAAAVAAGLSNTDLQWYDDPHLVERP

SEQ ID NO: 2221 - DNA, 723 bp, Corynebacterium glutamicum
  CDS (101)..(700): RXA01413
tttgccctattggaagaagtaaattccacaccttcactttccaatacttcttttggtgagcgggtttcctcagcgtttaaccatctgaaaccatctgagattgacccatctgttcttagaactcgatgagcgtttagtactgggtgttcagcaagatggttaccaatggactgagcatttgttccggctgccactgcaacatctccgtaactcgcccaatgacctgcagggattgaagatacgatggtgtgaactttattccacaacggggaaagatcaaggggtagaacttctgcctcaagcaaccgtcgttaccccaaataacttcgaggcttccaccctctccggccttgagaagcttgagaccgtcgaggacctcaaggaggctgcccgcctcatttatgagcaaggcccccagtacgtagtcgtcaagggtggcatggacttccccggcgagaacgccgtggatgtgcttttcgacggatcctcctaccacgtcttctctgagccaaagattggtgaagagcgcgtttccggcgcagtctgcaccttcgcagctgttatcaccgcagagctagcaaagggtgctgaggttgtagacccagtggcaaccgcaaagcgtgtggtcacccgtgcggttcaagatgctgttgcatccaacgcaccttttacctccgtatggcttgctgaggacaacaagtagagttttaaaataccgatcaa

SEQ ID NO: 2222 - protein, 200 aa, Corynebacterium glutamicum
LTHLFLELDERLVLGVQQDGYQWTEHLFRLPLQHLRNSPNDLQGLKIRWCELYSTTGKDQGVELLPQATVVTPNNFEASTLSGLEKLETVEDLKEAARLIYEQGPQYVVVKGGMDFPGENAVDVLFDGSSYHVFSEPKIGEERVSGAVCTFAAVITAELAKGAEVVDPVATAKRVVTRAVQDAVASNAPFTSVWLAEDNK

SEQ ID NO: 2223 - DNA, 630 bp, Corynebacterium glutamicum
  CDS (101)..(607): RXA01414
tattgcctaagtagaccaataggtctatgcttcatagaacaactagttcataagtgattagttttaagaatttattacctctctacaggagaacccagcgatggccgtttttgatttccctaaccccgttaacgaatatgcagctcgctgcactgcgggtttggttgttttgctgagcgccgccacgctttttgcctctggtgaccttcgtattattttggcaagcatcttgaccttcggcttcgcattgcgcgtggccggcggaccccgttactccccctttggacgtctttcagtacacgtacttgtaccactgctgaagaaagcaccgatcctgacccctggcccaccaaagcgcttcgcgcagaccatcggcctgggctttagcggtacttcccttatccttatggcctttggatttaacgttgcagcttccgtagtcctagtcatgctcatcgcagcagccaccttagaatccgtctttggtatctgcctcggttgctggggattcggcaagctcatgcgctacggcgtcatcccagaagacgtttgcgagcagtgcttccagaaggaatcctcccgcaccggctggctcgttagcctgaagtagcacttcgaatctaagaccac

SEQ ID NO: 2224 - protein, 169 aa, Corynebacterium glutamicum
MAVFDFPNPVNEYAARCTAGLVVLLSAATLFASGDLRIILASILTFGFALRVAGGPRYSPFGRLSVHVLVPLLKKAPILTPGPPKRFAQTIGLGFSGTSLILMAFGFNVAASVVLVMLIAAATLESVFGICLGCWGFGKLMRYGVIPEDVCEQCFQKESSRTGWLVSLK

SEQ ID NO: 2225 - DNA, 720 bp, Corynebacterium glutamicum
  CDS (101)..(697): RXA01417
agcctccccaaggctggttagtcccactatcctctcagagagaagcaaaactgaaataacttcagcctcagctatccccgcaatttaaggaaaataggatatgactgacaagtttgacagagtccttgctgtagaggtgtgcattcaggagtggatcgacgagcaaaacctcacgctagaggtgccattaatgattgcacgtttgcagcttagagacgtcgcgaaggatatcactgctgttcacgaagaaaaattctacgacctcactgatatcgatactgatgcctttgtgaaaaacatcaaactgggatggaatgaacgcttgatcaagaaaagcctctttccacaaccggacgtgcataaacaacatttcacagaaactgaacatggcattgacgcgactgtgacggtctggtcgaagggcttcgatccggaaagtggccccgacttcttggtttcctatgtggatggtctttggtcagccgatattagaaaccgcatcacgaaatttcagaatagagaaatcgttagcaaattctattttactccagaacatattaaggaggatggagatttctccgcagagatttttattaaccgaccagaaaatgacgacgactcacaagatttggtcgaggtgtggactgatcaagacaccagatactgcggtgaaatgatcatctatttcaaatggctctaaattccacttttctgcatcag

SEQ ID NO: 2226 - protein, 199 aa, Corynebacterium glutamicum
MTDKFDRVLAVEVCIQEWIDEQNLTLEVPLMIARLQLRDVAKDITAVHEEKFYDLTDIDTDAFVKNIKLGWNERLIKKSLFPQPDVHKQHFTETEHGIDATVTVWSKGFDPESGPDFLVSYVDGLWSADIRNRITKFQNREIVSKFYFTPEHIKEDGDFSAEIFINRPENDDDSQDLVEVWTDQDTRYCGEMIIYFKWL

SEQ ID NO: 2227 - DNA, 510 bp, Corynebacterium glutamicum
  CDS (101)..(487): RXA01421
ttgatgcacgtgcagaaatcgtcggcggtccgtggcacccatctgttaagggagactcggttactgcagggatcctgcgagatcgagtaaacgcctaaagatgacgtcgaaaagcattagcggcaagcgcccgaatctgccgtcgctcactggagcgcggtggctcgcggcgctcgctgtttattttttgcatgcgttggtgtttttgtcggtgtatccgttccagcagtcggaactgtttgccacaatccataaatttgtccccatgcagctgggttcagctggtgtaaccttcttctttatcttgtccggatttttgatctattggtcaaatagccagctcaagggcatgaagaatgtgctgtattactgcaagcgccgcatcaccaagatttatcccatgcacttgattgcgttgccgatgtttattgaggcgtcggcgaagttcacgactacaggcattacctgggtgctgattttgcgcgagtaaagctgtggctgcggaatgcg

SEQ ID NO: 2228 - protein, 129 aa, Corynebacterium glutamicum
MTSKSISGKRPNLPSLTGARWLAALAVYFLHALVFLSVYPFQQSELFATIHKFVPMQLGSAGVTFFFILSGFLIYWSNSQLKGMKNVLYYCKRRITKIYPMHLIALPMFIEASAKFTTTGITWVLILRE

SEQ ID NO: 2229 - DNA, 1008 bp, Corynebacterium glutamicum
  CDS (101)..(985): RXA01425
agtccctattaatcccaaggagtttcgactcacagtgctcaatttcatttattggccaatttcggccattctgtggttctggcataaagcgttcagctttgtgctgagcccagattccggaattacctgggccttgtcgatcatgttcttgaccttcaccgtgcgtatggttctggtcaagccgatggtcaacaccatgcgttcacagcgcaagatgcaagacatggctccaaagatgcaggccatccgcgagaagtacaaaaatgaccagcagaagatgatggaggagacccgcaaacttcaaaaagaagtgggcgttaaccccatcgcaggctgtttgccaatgttggtgcagatcccagtgttcctgggtctgttccacgtgctgcgctccttcaaccgcaccggttctggcgttggccagctggaaatgaccgttgagcaaaacgcgaacaccccgaactacatcttcggtgtcgacgaggttcagtccttcctgcgtgcagacctgttcggtgcgccactgtcgtcctacatcaccatgcctgctgacgcgttcgacgcgttccttggcctggatgtctcccgcctcaacatcgcgctggttgcagctccaatgattttgatcattgtcgtggcaactcacatgaacgcgcgtctgtccgtcaaccgccaggaagctcgcaaggcagccggcaagcagcaggccgcttccagcgatcagatggccatgcagatgcaaatgatgaacaagatgatgctctggttcatgccagccaccattttgttcaccggcttcatctggaccatcggtcttcttgtctacatgatgtccaacaacgtgtggaccttcttccagcagcgctacatcttcgccaagatggacgctgaggaagcagctgaggaggaggaaaagcgcgcagcaaagcgcactaccgctccaaagcctggcgtgaagccagaaaaccccaagaagcgtaagaagtaaaacttcactaaaaaccgcca

SEQ ID NO: 2230 - protein, 295 aa, Corynebacterium glutamicum
VLSPDSGITWALSIMFLTFTVRMVLVKPMVNTMRSQRKMQDMAPKMQAIREKYKNDQQKMMEETRKLQKEVGVNPIAGCLPMLVQIPVFLGLFHVLRSFNRTGSGVGQLEMTVEQNANTPNYIFGVDEVQSFLRADLFGAPLSSYITMPADAFDAFLGLDVSRLNIALVAAPMILIIVVATHMNARLSVNRQEARKAAGKQQAASSDQMAMQMQMMNKMMLWFMPATILFTGFIWTIGLLVYMMSNNVWTFFQQRYIFAKMDAEEAAEEEEKRAAKRTTAPKPGVKPENPKKRKK

SEQ ID NO: 2231 - DNA, 741 bp, Corynebacterium glutamicum
  CDS (101)..(718): RXA01429
ggtaagaagaagggcaagctcgtggtggaattcggcgacaaggatgatttcgagcgcatcatgtccttgatccagggccaataattttaagtttggcgccatgctccaggcttcccttttcccgatcgtgcaggaacacatagatttcctgcacccccaggcccgcaagtcggtgttttgggagctcgcacctgaggttgcagctaaagctgatccggtgtttgagaaggaagcctggctgtccaccacgctgctggaatatgaatcctgcggtttcaacattggttaccgcaatggaactccggcgttggcgtcggtcattttctgcgagcgcgatgccgccccgggcgcgaaggcgctgcctacggcaccggtgtctagcgacgctgcgatcatcagcagcctgttcatcgacgaggttttccggggcacgggcatggaatcggcgcttctcgacgcttccctcatggaactcattcggcgcgactacccagccgttgaggcgtttggataccgctcggaaaacacagaagcggatgcgatcgcagctaggcgtttagaaatcggcctgattgatgtggaggcgttagaatcagccggtttcgaagtggttgctgaccatcccgtgttaccccgtctgcggatggaattaccacccgcaacggtgctgctcacagctaaggatgcccagcgactccttcaagagatgggcgcgatttagccagcctgctctgattgcaa

SEQ ID NO: 2232 - protein, 206 aa, Corynebacterium glutamicum
MLQASLFPIVQEHIDFLHPQARKSVFWELAPEVAAKADPVFEKEAWLSTTLLEYESCGFNIGYRNGTPALASVIFCERDAAPGAKALPTAPVSSDAAIISSLFIDEVFRGTGMESALLDASLMELIRRDYPAVEAFGYRSENTEADAIAARRLEIGLIDVEALESAGFEVVADHPVLPRLRMELPPATVLLTAKDAQRLLQEMGAI

SEQ ID NO: 2233 - DNA, 669 bp, Corynebacterium glutamicum
  CDS (101)..(646): RXA01439
gttaatccacagcgccctgtgtgcactctattagtgaatatccggtgaatgctcgtccctcgactgtctacttagtaggtttgcaggctagtcttttgtcatgacccgatactttgcagtttccaatcttcaggagcttggctccctcgaagtacacaaattgtacaaacttcgtgtagatattttcgtccacgagcagcagactccgtacgcggagatcgatgacaccgatgctgccccaaccaccaatcacatcctggtttgggagcgcgccgacgccaccccaaccaacctcatcggctgcgcacgcctcgcgcccatcaccgccgccgagcttaaggcgtacaccggcaagggcatttcgcttgacgacgccaccccgctctcacaactcggccgcgtagcggtggcacaggaagggcggggctcggggctctcaggtgagctcatgcgcaacgcgctgcgtcttgcatatgagcagtaccccgaccgcgatgttgtcctgaccgcgcagaagcctttggtagatttctacgcagaatacggctttgaggtcttgggtgaggaataccttgactcgggtgttcctcaccttccgatgttgctcaaggctgatgagcttgaaaggttctcagacctagacgcctaatccgtagtcactggaactca

SEQ ID NO: 2234 - protein, 182 aa, Corynebacterium glutamicum
MTRYFAVSNLQELGSLEVHKLYKLRVDIFVHEQQTPYAEIDDTDAAPTTNHILVWERADATPTNLIGCARLAPITAAELKAYTGKGISLDDATPLSQLGRVAVAQEGRGSGLSGELMRNALRLAYEQYPDRDVVLTAQKPLVDFYAEYGFEVLGEEYLDSGVPHLPMLLKADELERFSDLDA

SEQ ID NO: 2235 - DNA, 1131 bp, Corynebacterium glutamicum
  CDS (101)..(1108): RXA01440
ttgatggaaccaccctcacgctgaccacgcctcaggggaatcagtattgggcaaacacacacgattttggagccggcacacactaattttaggagcactgatgaaaaccaagtggttagcgatcattccattcgtggcgcttgcggtggttgcatgctctgatacgcagccgccggttacagaaacagtgacagaaaccgccccgcaacctacttctgaaacggcagcgcagccaccacaacccacgacacctgcggaaacgaccacgcagcaggcagaaggtatcaacttgacgcctcgctacactcgccaaaatgtggggcacttttccagtggttatcagcctggacaggtgagtttttcctcagctgatggaaccattaaatgtgagtttcgccccatggaacaggacgcacctatcaaccgggagccctccaccgattggcggttgagtttcgtgcagggtgcgtgccaattcgacgatggttacgtagtggcggatacaaatgtggaaaacagaccaggttttgctgagtacaccacggcgatttctcatgtcatgccggaaaattacaccacgttgccgccgggaacctacatcgatttacacaccatggcttgtttcaccgagtctgccgatgaaatttcctgcattaagtacgcgaccaatgaaacattccgcatcagcgcgcagggttttgagatgctctcaaatgcccagcgcgacgcggaactaaccacacaaggtggcttgtaccaggcattttccaacatcgcggaattacggttcagtgacggcaacgccatgtcatgtttctttgacgcgccgggatcgcaagatttctggtgccaaacactcagcacccccggctgggacgacggcagcaacctcattcatttgacggtcaccggcggaaaactcagcctgatgggcacccaagtgggcaaccccggcctcgactatttccgcggccgccagctcattgaggcgccaaattcgcttctcgacgcctccctctccgtaacactcgacggcgatcgggtgcgtttccgcaccgcgaccggcgaggagatgtgggtgagttccagtgactacggattaggcgtctaggtctgagaacctttcaagct

SEQ ID NO: 2236 - protein, 336 aa, Corynebacterium glutamicum
MKTKWLAIIPFVALAVVACSDTQPPVTETVTETAPQPTSETAAQPPQPTTPAETTTQQAEGINLTPRYTRQNVGHFSSGYQPGQVSFSSADGTIKCEFRPMEQDAPINREPSTDWRLSFVQGACQFDDGYVVADTNVENRPGFAEYTTAISHVMPENYTTLPPGTYIDLHTMACFTESADEISCIKYATNETFRISAQGFEMLSNAQRDAELTTQGGLYQAFSNIAELRFSDGNAMSCFFDAPGSQDFWCQTLSTPGWDDGSNLIHLTVTGGKLSLMGTQVGNPGLDYFRGRQLIEAPNSLLDASLSVTLDGDRVRFRTATGEEMWVSSSDYGLGV

SEQ ID NO: 2237 - DNA, 1152 bp, Corynebacterium glutamicum
  CDS (101)..(1129): RXA01441
ttataacaattagccgtgagggtattaatcaaggtttcgggagactaacgttttagaaacaagtggactccagcacacctcgtgagatggcaggttcatcatggctagaacgacaacagcgcacgcagttctcatggcgcttagttcagtcgggcttttgatgctccaggcctgctccgaacaggaacaaaccccagaacaaacgccagcgcccaccctgacttcgcaggctcccgagactcctcaagcctcaacaacctcctcagcaagctccacagcaactcccatagcaactcccatagcagccaccgagttggattatctccacatcgatccagcaacgtatgacatcggtgtccaagaccaagaaactgccgtatttaccactggcgatgggatcacagcgcagtgtttcttcgaggcaacaccgggggagaccagctatcagatcaaggagtttgatttcgacgaaactgcgggaacgtgcgcttttggtgatcaacacatcagcgtcaccacggatgaaaatgtccgggaacgctttgccgaattgagtgaaaccgaagaagaattaccagaagcgcaagcgactctcgatgttggtgagatggtgcatcttggtcacatgggttgttgggcgccgagtgtatcggagtttagttgtctcgatttcgcctccaaccaggcgttcaccatgaatgaacagggcttccatgagcttgatcctgcaaaagccactgagcagctaattaattcgagtggccaggttcaaacgttatcgaaaatgacgaatttccagttcaccgatggcaccagcatcacctgtgtcagtgagttgcaggcggaagagttcttgtgccacaacagtggtcctggaggctggtcaacttcagctggccctgccaacaccctgtggtggaatctgaaccaggccgactccgagtttgagggtgctcgccccacgaatccaacgcaaagcgtttataaatctcaacaaatattcggtccgggatcgtatctcctcgcgaacggtgtgagtgcagaatttgatggaaccaccctcacgctgaccacgcctcaggggaatcagtattgggcaaacacacacgattttggagccggcacacactaattttaggagcactgatgaaa

SEQ ID NO: 2238 - protein, 343 aa, Corynebacterium glutamicum
MARTTTAHAVLMALSSVGLLMLQACSEQEQTPEQTPAPTLTSQAPETPQASTTSSASSTATPIATPIAATELDYLHIDPATYDIGVQDQETAVFTTGDGITAQCFFEATPGETSYQIKEFDFDETAGTCAFGDQHISVTTDENVRERFAELSETEEELPEAQATLDVGEMVHLGHMGCWAPSVSEFSCLDFASNQAFTMNEQGFHELDPAKATEQLINSSGQVQTLSKMTNFQFTDGTSITCVSELQAEEFLCHNSGPGGWSTSAGPANTLWWNLNQADSEFEGARPTNPTQSVYKSQQIFGPGSYLLANGVSAEFDGTTLTLTTPQGNQYWANTHDFGAGTH

SEQ ID NO: 2239 - DNA, 1116 bp, Corynebacterium glutamicum
  CDS (101)..(1093): RXA01445
gagtctcgaatgtataacgagtttgttcctaataactttatcattaactatgcctgcaataggcttgggaaattttggcatccaggtaatcgcgctgtcaatgatcccacttattaatgtacgttttcccgttgccgccttacctctcgcattagtggcgactgtatggcttaatgcttgggcagaccatcttctcctaactggttttattgtttatcttgctgtggaatacgcaacaagccgtgggcgcttcgctctcgcattgattttgggagttgaatggatcttaattgcttatggggtagctttggaaaggcctcttgaggctaaagactctccatctctcattaccgaaattttgctcatacttgtagcagctggcacaggggcaggtcggtggaaaattttgagtgaacgcaagcaacgtgcaattactcagcaggaaatcatcaaaaaaatccgtactgatatagcgcactatttgcatgacagtatggcaagatcgttggcaataatgatagttcaatcaaagctgactgaactagagcctgatccaaaaaagattcaagaaaaactaaacagtattgccaaaattggacaagaggcagtggctgatttgcatcaattagttagacacctcgtggtcgaggagtctgctgaaaaagccacagcgtttggagcatgggctgcagtttctattcatgacacggttaattctgccattcagttattagtagatgcaggacatgtcgtttcctttgacagtagaaaaaagaactataagctggaccatattgctgaaacggcgtttgctttagccttcaatgaggcagtctgtaatgcaattaaacattctccgcccaaggcaaacgttactattcgcataacagaaaaagcacagtctcttcagattctagtaatgaatcctattggagattggcatgcaaatggggagtccgcaattccaggtgtgggcattggcgtagaaagcttaaccagaaggatacgtaatattaaaggacaggtctgtgtgacttcactgcaaggatactggaaagtagttatttcactacctttgaaatgtgaggattcttaaattgtctctatttgttgaac

SEQ ID NO: 2240 - protein, 331 aa, Corynebacterium glutamicum
MIPLINVRFPVAALPLALVATVWLNAWADHLLLTGFIVYLAVEYATSRGRFALALILGVEWILIAYGVALERPLEAKDSPSLITEILLILVAAGTGAGRWKILSERKQRAITQQEIIKKIRTDIAHYLHDSMARSLAIMIVQSKLTELEPDPKKIQEKLNSIAKIGQEAVADLHQLVRHLVVEESAEKATAFGAWAAVSIHDTVNSAIQLLVDAGHVVSFDSRKKNYKLDHIAETAFALAFNEAVCNAIKHSPPKANVTIRITEKAQSLQILVMNPIGDWHANGESAIPGVGIGVESLTRRIRNIKGQVCVTSLQGYWKVVISLPLKCEDS

SEQ ID NO: 2241 - DNA, 972 bp, Corynebacterium glutamicum
  CDS (101)..(949): RXA01447
tccatgaagttggagtatgcacgcgtgtgcgcacacagacgttatttcatcttactatcccatgtgaggtttttaatcatcgcgatactaagcttgcggtatgcgtcttctggttttgcggtgcgatgccccacacatcaacgaattccctgccctttccacctctgtggagatccacgatttgcctgcggtgcccacccgaaaagacctcaaaattcttgatgatgtggcctttgatgtgctccctcaggatcccacgccttctctcgatgagatcgccaagcagcctgatgtcgagcatttgagcagccctaagtttgcgccacaacagcctgaaacccgtttgcgcatcgtggtgatcggttcggatgcagcgctgtctgcggtcctgactcgtctcatgcgcgccgataatttgtgggcggagattggattcgtgcccgttggtccttcaacggctgcgaagaactggggtctgcccgccgatgaggctgccgcgcttgagctcgcactgaccggattggtcaatcctgccccgctcatccgcgatgacgttgcggtcgccgtcgccggttcagccaccatcaccaactgggagccgggtgagatcaccggcgaagtcatcgtcgatgatcatgttctcatccgccacgaggctgcctcgaaggccccacgccgtggcgtctacggtgcccgcttggtgccgatgcttgacgccccaggcatcgctgcggtcatcatggacactcccctgcccggcgaggtgccctcccgcagcctgttccctcgcccctcgggctcggttattccagagagcttttcgacgggccgtgccatgcaagccggcggcccctcgctacaaatccgggttgacggaatttcccgcaaacgtaaagtggagcgcgttaccttctatcgacatttgcgcgatctccaaatcgtgcggccgtaaaacaaggagccagcatggca

SEQ ID NO: 2242 - protein, 283 aa, Corynebacterium glutamicum
MRLLVLRCDAPHINEFPALSTSVEIHDLPAVPTRKDLKILDDVAFDVLPQDPTPSLDEIAKQPDVEHLSSPKFAPQQPETRLRIVVIGSDAALSAVLTRLMRADNLWAEIGFVPVGPSTAAKNWGLPADEAAALELALTGLVNPAPLIRDDVAVAVAGSATITNWEPGEITGEVIVDDHVLIRHEAASKAPRRGVYGARLVPMLDAPGIAAVIMDTPLPGEVPSRSLFPRPSGSVIPESFSTGRAMQAGGPSLQIRVDGISRKRKVERVTFYRHLRDLQIVRP

SEQ ID NO: 2243 - DNA, 402 bp, Corynebacterium glutamicum
  CDS (101)..(379): RXA01452
ccgccaagaaggtaaggactacgtgatggtcgatggcgacgttgtggagttccggtttaacgtctagcgttattgacgctcctcgttatacgctggtctcgtgatcagatcgttcgccgaccgcgacaccgagttggtctggttgcgtgaaggtgcgaaacgcgtcgatccgcgaatacacaaagtggcgaatcggaagctgcatctgctggacgcggcgacgaccctcgatgctctgcgtgtgactccggggaatcgcctggaaacgctcgagggtgatcgagtcggtcagtacagcattcgagtcaacgaccagtggcggatctgcttccgttggaacgactcgggccccgaaaacgtcgagatcgtggattatcactgaggaggagacgatggctcaga

SEQ ID NO: 2244 - protein, 93 aa, Corynebacterium glutamicum
VIRSFADRDTELVWLREGAKRVDPRIHKVANRKLHLLDAATTLDALRVTPGNRLETLEGDRVGQYSIRVNDQWRICFRWNDSGPENVEIVDYH

SEQ ID NO: 2245 - DNA, 645 bp, Corynebacterium glutamicum
  CDS (101)..(622): RXA01456
aagacaatatccttatatgtacgtgattatgcgtttctcccccactctacggtttaatcacctataaaggccaacaagtagttcacaaaaggaaaaaattatgaacgattccatttttagtccccaagcactgaataaagcgatgctcgaagccgtcgagtttatccacgccgaaggttgggacgccggccctaccctgttcgcattggtccccactgaaatgctggtggatactcttgatgaggcagctgacgactccccactaacccttgttgtacaggacaacctccctgacaacttgctgccaggttccgaagcgttaggtgactatgtgtcccgtttggcgtggccagcagagattgccggcgcggtgttggctcaggaaattatgttcaccgatgctgccgttgcaggctcagaaccacgacccgctcgtcttttttccggcgttttgcgcggcgaagcagaactcacccttctgcagcttcgccccaccgaagaggaattggcagaacgcggaccgtttgctgaagatgaaatcgaactgcgcggcggcccaggggttgcaccgggtgtaatcgcagcactgcgctacaccctcgaagcggacccagacgaaatctaaaaactgacttttcgtccagg

SEQ ID NO: 2246 - protein, 174 aa, Corynebacterium glutamicum
MNDSIFSPQALNKAMLEAVEFIHAEGWDAGPTLFALVPTEMLVDTLDEAADDSPLTLVVQDNLPDNLLPGSEALGDYVSRLAWPAEIAGAVLAQEIMFTDAAVAGSEPRPARLFSGVLRGEAELTLLQLRPTEEELAERGPFAEDEIELRGGPGVAPGVIAALRYTLEADPDEI

SEQ ID NO: 2247 - DNA, 798 bp, Corynebacterium glutamicum
  CDS (101)..(775): RXA01457
gaagcggacccagacgaaatctaaaaactgacttttcgtccaggttcgctaggataaattaagttaaccccgcccacaatttatttgaggagttcacactgtggcgtccaccccgcacaagcatgtccgcgttgcactgggattagtggcgctcattcctcttttagctgcatgtacgggcggcggatccaccgaaacttccactgaatccacggcagaaacaactcctgcgacaacaacggaagcaacgacaactcctgctaccactgcttcgtcttcagtaattgaaacgacagagtcaagcactgccgaaacgtcgacgaaagagagtggggagacgtcgacaagcaaacctcgtatgaccaaggacgttgaagtcgcctataaagctttctcctcgctcgcgcccgtcgagctttttgagcaattcgaaacctgcgacccgtcaggggtcgaggattccttcgcgtgcaacgggccggaagttggccaattccaattctttgacaatgcgtcgaaggccacgagcacgacgcagctgctcacggaactgcgcagctcacgcgtggttgaggattccggatccaaggttgtgggctggaccacgattggcacgatgtcgattatcacggtcgttgataatgaccaaggcctagtgctgcagcaaatggtgtcctccgacaaaatcgatccggaggaacgcatctacgaacttgggctgtcgacaccgaaggacactgaagagtcctcggaagaaacctcagcgtctaaaaactagccacacgtctggaaatcaga

SEQ ID NO: 2248 - protein, 225 aa, Corynebacterium glutamicum
VASTPHKHVRVALGLVALIPLLAACTGGGSTETSTESTAETTPATTTEATTTPATTASSSVIETTESSTAETSTKESGETSTSKPRMTKDVEVAYKAFSSLAPVELFEQFETCDPSGVEDSFACNGPEVGQFQFFDNASKATSTTQLLTELRSSRVVEDSGSKVVGWTTIGTMSIITVVDNDQGLVLQQMVSSDKIDPEERIYELGLSTPKDTEESSEETSASKN

SEQ ID NO: 2249 - DNA, 1287 bp, Corynebacterium glutamicum
  CDS (101)..(1264): RXA01463
attagaacaaatattcgttagaacacttgtttgttttgatttgtgtggttagggtgggtgctaatgagttaaaaaggggaaatttaaaccattagggggcatggaaatgtcatacttcagccatcaggacccaaataatccagagagtcacatcaacttcaccatggcgcaaatggagatccagcgctggactttgctgatctcaaacccagaggcggacgctagcactcttgtcatggagttgaaaaccgtcacgggggaatccaagcattttatcaaccaggctattaacgccatgtgggctttaatgaagctgcccattttaagagtggtggtagaaactcacttccacgttcggattccgtacctggcccgcattatgcaggcagtcaagcaggctaaaccggagttgtgggatgagttggaccatcgcattgccgaaaagctgacaccgcgcattgctggccaggcactgatggaagcctccgcacttgcagggctgattactcgctggatcaaggaactggatccaaccttcacaggaaagaagcgtgggccaaaggggagtgatggcaccttgactttccgccacgtggacgggcgtacgtacatcagtggaaatattgacggtgtcaccggcaagctgttccaaaaagctctggaaaaagtgaaacagaagggcgaggacctcgcgcgggccctggtcaccttcctggcggggcggaccaaagtgaaaatcgtcagcgcggtatacacgcccctggtgggtggcgtgtcctggattccgggggtgggattcctgagtcaagaggagtcccggaagctgggtaagactgcctcgaaggtcattgacctggatacgatcgccactcgtgtggaaaatggctacaccccaagtcccgagctacgcctttatgtgatggggcgggacggcacctgtaggcatccgggctgcacggtgtctgccgacaactgccagatcgatcacgtgatcccgttcggtgagggtgggttgactgtggcctggaacttgcagtgcctctgcgcgcatcatcacaatatgaagactgatgggcgcatccaggcggcgattgattccatgggtcgggtcgcctggattgggccgtgcaatcgcacagtggtaaccgaacctgtcggaccgttggcgcaagagatgcccacggggcagtgggggcagactctggaagcacggatggagaagacttttgaaaagctccgcagttcactcgaggtattggatgactaaacccttatgcacacccctag

SEQ ID NO: 2250 - protein, 388 aa, Corynebacterium glutamicum
MEMSYFSHQDPNNPESHINFTMAQMEIQRWTLLISNPEADASTLVMELKTVTGESKHFINQAINAMWALMKLPILRVVVETHFHVRIPYLARIMQAVKQAKPELWDELDHRIAEKLTPRIAGQALMEASALAGLITRWIKELDPTFTGKKRGPKGSDGTLTFRHVDGRTYISGNIDGVTGKLFQKALEKVKQKGEDLARALVTFLAGRTKVKIVSAVYTPLVGGVSWIPGVGFLSQEESRKLGKTASKVIDLDTIATRVENGYTPSPELRLYVMGRDGTCRHPGCTVSADNCQIDHVIPFGEGGLTVAWNLQCLCAHHHNMKTDGRIQAAIDSMGRVAWIGPCNRTVVTEPVGPLAQEMPTGQWGQTLEARMEKTFEKLRSSLEVLDD

SEQ ID NO: 2251 - DNA, 1155 bp, Corynebacterium glutamicum
  CDS (101)..(1132): RXA01469
tccatcgccgatcttgccgattgctgggacgatcctttcggtgacggtgcatttcacgtaccagatgagcagcagttcactgactagtattctgtaggtcatggcatttgcagacattgtgcgcagcgtcgaaaaccgcaccaacgcagcgaccctcaactggtccatcaaaaatggctggaagcccgaagtcaccggattttccgggtacggctccgggcgtcgagtgcgcgtccttgcgcgcgtgctcatgtccaaccccgaaaatttgcttgtcgacgccccctcccaatcaattacccaacaagcacagcgcggttggcgccagttcttcaccatccaagtgcccaacctgccagtaactgtcaccgttggtgggaaaacagttacctcatccaccaacgacaacggctacgttgacctcctggtggaagaccacaaccttgaccccggctggcacaccatccagatccaagccgaaggttccacccccgccgaagcccgcgtcctcatcgtggaaaacaccgcccgaatcggactcatctccgacatcgacgacaccatcatggtcacctggcttccccgagcactcctcgccgcatggaactcgtgggttttgcacaccaacacccgcaaaccagtccccggaatgaaccgcttctacgaagaactcctcaaagaccaccccgacgcacccgtgttctacctctccaccggcgcatggaacacctttgaaaccctccaagagttcatcaacaaacacgcactccccgacggccccatgctgctcaccgactggggaccaacccccacaggactattccgctcaggtcaagagcacaagaaagtccaactgcgcaacctgtttatcgaataccccgacatgaaatggatcctcgtcggcgacgatggccaacacgatcccctcatctacggcgaagcagtcgaagaacaccccaaccgcatcgcaggcgttgcaatccgtgagctctcccccggcgaacatgtgctctcccacggaacaactgcgtcactgtccaccatcacgaccaacgggggccaaggagtcccagtagttcacggccgcgatggatatgagttgctgcagcgctacgagacgaagccgttcgcctgagtcctactgggtgtctcatg

SEQ ID NO: 2252 - protein, 344 aa, Corynebacterium glutamicum
MAFADIVRSVENRTNAATLNWSIKNGWKPEVTGFSGYGSGRRVRVLARVLMSNPENLLVDAPSQSITQQAQRGWRQFFTIQVPNLPVTVTVGGKTVTSSTNDNGYVDLLVEDHNLDPGWHTIQIQAEGSTPAEARVLIVENTARIGLISDIDDTIMVTWLPRALLAAWNSWVLHTNTRKPVPGMNRFYEELLKDHPDAPVFYLSTGAWNTFETLQEFINKHALPDGPMLLTDWGPTPTGLFRSGQEHKKVQLRNLFIEYPDMKWILVGDDGQHDPLIYGEAVEEHPNRIAGVAIRELSPGEHVLSHGTTASLSTITTNGGQGVPVVHGRDGYELLQRYETKPFA

SEQ ID NO: 2253 - DNA, 549 bp, Corynebacterium glutamicum
  CDS (101)..(526): RXA01470
aagacgaacctcgtcttacttcctttagtaactgcacatatctacttgtatatgtgtgcgggaattgaaggcagttaagtgttgccgaaggaaaccgaacatgacgaacaatgcattaaccgtgccaacccggacccgtcatcaggcggatttgctcacggcagacttctgggaagacatggggttgccccaactgaaaactaccatcgaagaatccatcgacgatgtagccctcccaatgcataccgctgttctagaaatcagcggaatgccaaaggaactgcgtcagaccgtggaatccgcaatggttgtgtgtattccgagtccttcggagctgtccggctccaacagggacccgctcaccgcacgatggttcactgcatggcgccgtgacccattcgaacttggcctcactgagtgtcgagaggtgatcaccggaactccacgcgaactcgacaaacttcgaggagtgctggaatctctggctgatgaataccgttttgaagttgagctgcgaatcgttgactagaaagccagtgattctttagc

SEQ ID NO: 2254 - protein, 142 aa, Corynebacterium glutamicum
MTNNALTVPTRTRHQADLLTADFWEDMGLPQLKTTIEESIDDVALPMHTAVLEISGMPKELRQTVESAMVVCIPSPSELSGSNRDPLTARWFTAWRRDPFELGLTECREVITGTPRELDKLRGVLESLADEYRFEVELRIVD

SEQ ID NO: 2255 - DNA, 579 bp, Corynebacterium glutamicum
  CDS (101)..(556): RXA01472
gcacgtccacgcgccggacttgcgcgcctatttacaagcacgcttatcgacgtaattacactcggtggaaaccgtcgcggaaaaatggaggatcctcgccatgaaccaagcaaacctgcctgccgaaatcgcggacctctccgatgaaaccgcactgtgggaaatcatcaacgaatacaactgggacgacggcttcgcggttccccttgcagtagtccgacaccccaaatgcgaccgagcgctagcccttcgcctgttttgggacatcgatgaaaccgcccaaatccaccactccgacgaagaatcagcgatcgccgagttgtacgccagcaccgcagaaaacgacccagcagaattcgacagaatcatggactactgcaccacactggtcgaagggctccgcaagcagacctatcctcggggcgccaaccgtttcgacacgggatttttcaacctcgaggacccttctttgaccgaccgtcagcgcaaaatccgcgccgggaaaaccaaatttgcgctcaagaatttcgaggaagctttcctccaaccagagctataaaaaaggttgtagaagaaatt

SEQ ID NO: 2256 - protein, 152 aa, Corynebacterium glutamicum
MNQANLPAEIADLSDETALWEIINEYNWDDGFAVPLAVVRHPKCDRALALRLFWDIDETAQIHHSDEESAIAELYASTAENDPAEFDRIMDYCTTLVEGLRKQTYPRGANRFDTGFFNLEDPSLTDRQRKIRAGKTKFALKNFEEAFLQPEL

SEQ ID NO: 2257 - DNA, 888 bp, Corynebacterium glutamicum
  CDS (101)..(865): RXA01473
cgtaagcaattcccaccaatgcagtttcctcggtgcgttatagtgtcgagtagggccaaaaaccaacaatatcctggtagccaagaataagatcgtgcttatgactgacatcggtgatgtcgatcaaatagtctgggaattcatccatttccacgatgactcgataaatccattctttgagttcatcaagagtgattgcatcaacgatgaggcaatcgaacgcaaaacccagatcctcggaatcatcttgggtaacgagccatgcgggagtgttattcacgcccgccagaatacaataaagcccatgagccatacggtctcttttggcgacggctggatccaagtccttgaggatgctgcagaaaccgtgtcgatcaccgacacgttggatgccctccgattttctcccgagcaagcggaatgggctgcagaattcggaccactactgtgcggcccagcgaaccaaccgccggcgtatctcacggctttagacgggcacacaaagctaccgcttagcccgcagctgacggagttctatagctacgcccgatcctggacaaacagtgaggccttgggaaacgtcattgatcccgatgactacctcgatcatctcaccgaccctcgccttcatttgcaggatcttctggataatgagtttgaacgggtgggggtgctcgtcgataagcaaaatcgcccgctcgaccctgcccggtgcgcgctgttctcgctcgacgcacttgcacgcgcgccctacaaccgcgcctacttcgtcttcgccgcgcccgagcctgagatctgggcgtttgagaacgagcacgtccacgcgccggacttgcgcgcctatttacaagcacgcttatcgacgtaattacactcggtggaaaccgt

SEQ ID NO: 2258 - protein, 255 aa, Corynebacterium glutamicum
MTDIGDVDQIVWEFIHFHDDSINPFFEFIKSDCINDEAIERKTQILGIILGNEPCGSVIHARQNTIKPMSHTVSFGDGWIQVLEDAAETVSITDTLDALRFSPEQAEWAAEFGPLLCGPANQPPAYLTALDGHTKLPLSPQLTEFYSYARSWTNSEALGNVIDPDDYLDHLTDPRLHLQDLLDNEFERVGVLVDKQNRPLDPARCALFSLDALARAPYNRAYFVFAAPEPEIWAFENEHVHAPDLRAYLQARLST

SEQ ID NO: 2259 - DNA, 669 bp, Corynebacterium glutamicum
  CDS (101)..(646): RXA01474
catcaccgatgtcagtcataagcacgatcttattcttggctaccaggatattgttggtttttggccctactcgacactataacgcaccgaggaaactgcattggtgggaattgcttacgcccgtttccctgatacccgcgacgattccatcagccgcggcaaagcacgatcagcgttggagaaatccacgggccttaaagagcgtttcgcgcgtcattttcctgcaatttccatacctgtcgatacgggtgatgctgcagatattctcgtatcgggttggtggctttcaggttctaaaaagaagatcctgactgcagcggaaatccagaccttatttatcaaccgattggccacaggtccattgagcactcaattggaaactgctaccgggttgaaactgcaggtggtgaccaatcgagagcgtatgaagatcactctcattgaacccaaaggcacatcaggacatgccatcgacccccaagctggcaagggttcaaggggtggcttcctcctggacaatggccaagaagatgaatacgacgatgtcgacaccgtcacaatccccgatgcactcaatgtcatcggttacattcttacccatggaactccacctcaagaaggctggaaggtagacgtgttggagcgttagtcctcgatgaattcttctcc

SEQ ID NO: 2260 - protein, 182 aa, Corynebacterium glutamicum
LVGIAYARFPDTRDDSISRGKARSALEKSTGLKERFARHFPAISIPVDTGDAADILVSGWWLSGSKKKILTAAEIQTLFINRLATGPLSTQLETATGLKLQVVTNRERMKITLIEPKGTSGHAIDPQAGKGSRGGFLLDNGQEDEYDDVDTVTIPDALNVIGYILTHGTPPQEGWKVDVLER

SEQ ID NO: 2261 - DNA, 549 bp, Corynebacterium glutamicum
  CDS (101)..(526): RXA01475
tggatctcaatgtagtcgcaatacggcttttattcgtcaggcagttctgcgaatagtattcgtgcacattggattcacacccgtagtagtttttgggggaatgagcatccaagggttttccgcaggtgactattctgcatgttttgaaccgcgcatcgatgcgtgggttgatattcgcggtccgcggaagcccgagtggttggcggaaaatatcgataatccgctgagacactggggcgataatcctcatatcccggtgtctgctgcgaaaaaggctggaaatatttacaaagagacccttcgaaccatgagagcctcaacaaagaccccagaccaggatcccttaaaagaaaccctgcgcagcttcatcgcaagcatcaaccagctcgccgcaaagaagaatttcattgatgccggggtgcgcgaagatatcgttgttgcgctggaaaaactatgcgaagcagcagaagctagcccagaagaaattcagcaggcgatcgtgatgggagaagaattcatcgaggactaacgctccaacacgtctacctt

SEQ ID NO: 2262 - protein, 142 aa, Corynebacterium glutamicum
MSIQGFSAGDYSACFEPRIDAWVDIRGPRKPEWLAENIDNPLRHWGDNPHIPVSAAKKAGNIYKETLRTMRASTKTPDQDPLKETLRSFIASINQLAAKKNFIDAGVREDIVVALEKLCEAAEASPEEIQQAIVMGEEFIED

SEQ ID NO: 2263 - DNA, 465 bp, Corynebacterium glutamicum
  CDS (101)..(442): RXA01476
atccaagaaatttcgcacctcaggagtagcgatacttcgtaaatttgggaagaaggagtagccacatgacgttgatcgacctcactgctggagtgagcgcatgagcgattcaccgtgcaccgtcgtcatcctgaaccgcacagctactgcgacttccatcctgagagatattaaagccctcaccggttacggcctgtctgagatcaggtcgcgcatcgttgcgggacttcccgtcgtgatcgaggagatgttctcaaacgcctggtacgacgaacgcgcacaactgttgctggcactgctgaccaaatggcagaacgaaggaatcacattcgagattcgggaagtcgctgaggatgatcccatcgaagcaggggcattgatctctctagaagtgctgcgaaacatcattgagccagacgataatgaatcgagggacggtatctagtggtgaacgtaaacccccgg

SEQ ID NO: 2264 - protein, 114 aa, Corynebacterium glutamicum
MSDSPCTVVILNRTATATSILRDIKALTGYGLSEIRSRIVAGLPVVIEEMFSNAWYDERAQLLLALLTKWQNEGITFEIREVAEDDPIEAGALISLEVLRNIIEPDDNESRDGI

SEQ ID NO: 2265 - DNA, 954 bp, Corynebacterium glutamicum
  CDS (101)..(931): RXA01488
ccttgatatcgccaccggcatcgatgatgccctcgcacttgcctacgcactgggctcacctgaactagagctcattggtgtcaccaccacctacggtaacgtgctactcgaaaccggtgcagtcaatgacctggcactgcttgatctgttcggtgcaccagaagtacctgtgtacttgggtgagccacacgcacagaccaaggatggctttgaagttcttgagatctccgcgttcattcacggacaaaacggcatcggcgaagtcgagctgccagcaagcgagtcaaaggcactccccggcgcagtggatttcctcattgattccgtcaacacccacggcgatgacctggtgatcatcgcaactggtcccatgaccaacctgtctgcggcaatcgcaaaggatccaagctttgcttccaaggctcacgtggtcatcatgggtggcgccttgactgtcccaggcaacgtcagcacatgggcagaagcaaacatcaaccaggacccagatgcagcaaacgatctgttccgttccggtgcagatgtcaccatgatcggtcttgatgtcaccctgcagacccttcttaccaagaagcacactgcgcagtggcgcgaactgggcactccagctgctatcgcactggccgacatgactgattactacatcaaggcatatgagaccaccgcaccacacctgggcggttgcggcctgcacgacccactggcagtaggcgttgcagtggacccaagcctggtcactttgctccccatcaacctcaaggtagacattgagggcgagacccgtggacgcaccattggcgatgaagtccgcctcaacgatccagtgcgcacctcccgcgcagctgtcgccgtagacgtggatcgtttcctttctgaattcatgacccgcatcggccgagtcgcagcacagcagtaaaagcagctctggtgaaggtt

SEQ ID NO: 2266 - protein, 277 aa, Corynebacterium glutamicum
VLLETGAVNDLALLDLFGAPEVPVYLGEPHAQTKDGFEVLEISAFIHGQNGIGEVELPASESKALPGAVDFLIDSVNTHGDDLVIIATGPMTNLSAAIAKDPSFASKAHVVIMGGALTVPGNVSTWAEANINQDPDAANDLFRSGADVTMIGLDVTLQTLLTKKHTAQWRELGTPAAIALADMTDYYIKAYETTAPHLGGCGLHDPLAVGVAVDPSLVTLLPINLKVDIEGETRGRTIGDEVRLNDPVRTSRAAVAVDVDRFLSEFMTRIGRVAAQQ

SEQ ID NO: 2267 - DNA, 1119 bp, Corynebacterium glutamicum
  CDS (101)..(1096): RXA01494
gcgatgaggagctggctaaattgcgcgaaggtgcagcgcctgcaggtgatgcagatccttacaagacttcatccaagtctgaatctgaggaataacaccagtgacggataatagtcagtttcatgctgcttcagcattagtccaggcagctcacacggttagcgttgtggggcatctgcgacccgatgctgatgcaatcggcagtgtagctgccacagtggcggcactacagcaacttggtaaagacgccgtaggtgcaatcggccagctagattcgatgcccgagaacttgtacaccattcctggggcatcaaacattaagtttggcgattcactgccggaatctgacctcatcattgttgttgattgtgggtcaatcgaacgcaccggtgcgtttgaaagcatcatcgtcaacaatcctgacaaagtattggtggttgatcaccacgccaccaatcctgggtttggtgccgtcaacttaatcgatgtggaggcagaatccaccaccacgattttatatgactggtttgatgcgatgtcggtgcaaattactcccgatatcgcccacggcctttatgctggactgctcaccgataccgggtgcttcaggtggggtcgaccagtcatgcatgacatggctaaagaactcatggagttcggtctagacattcgtgccatttcatcagcattgcttgatcaaacctccgtggatgatttgcgtcttgttggccagattgtctctcggatcgagctgcgggaagcagggccatatactcttgctgttctcgtggcagacttcgataccatcaacggccgttcacgcgccgttgtggaaggcttgatcgaaatggttcgcgctgtggaaggcgcagacttcggagcagtattcaaagaatatgaacgtggcgtctataccgtgtcactgcgttcctccaatttgagtgtcgcttccttggcagtgcatcttggcggtggcggacacattcctgctgcaggctataccgctcgtggtacggaaatcgaagccctcgatacgttgattgaagcaaccgttaccttgggggagtctttgcgaagctcggcgcatgtcgatgtctaacaacgactttgagcatgagt

SEQ ID NO: 2268 - protein, 332 aa, Corynebacterium glutamicum
VTDNSQFHAASALVQAAHTVSVVGHLRPDADAIGSVAATVAALQQLGKDAVGAIGQLDSMPENLYTIPGASNIKFGDSLPESDLIIVVDCGSIERTGAFESIIVNNPDKVLVVDHHATNPGFGAVNLIDVEAESTTTILYDWFDAMSVQITPDIAHGLYAGLLTDTGCFRWGRPVMHDMAKELMEFGLDIRAISSALLDQTSVDDLRLVGQIVSRIELREAGPYTLAVLVADFDTINGRSRAVVEGLIEMVRAVEGADFGAVFKEYERGVYTVSLRSSNLSVASLAVHLGGGGHIPAAGYTARGTEIEALDTLIEATVTLGESLRSSAHVDV

SEQ ID NO: 2269 - DNA, 1041 bp, Corynebacterium glutamicum
  CDS (101)..(1018): RXA01497
cgcccacgggcaaagttttcaaaaactctgatccatatggatcagagttttttcgtatctgccaccagaaagacgcccctttggcacgccgaattagtcaatggtgggtaaacttcccatcatggctgaaaccaacgaaaatgatcttccagttatcgaccttgcccaaatcgaaggctatgttgtagatgactcggatgaagatgatccagtacttctgcgtccagatggaacccccattgaaacctggcgcgaagacttcccttatgaagagcgcgtcacccgcgaagactatgagaaggtcaagcgctccctccagatcgagctgctgaagtggcagaactggaccaaggaaactggccagcgccacatcattttgttcgaagggcgtgacgccgctggtaagggtggcaccattaagcgcttcaacgaacacctgaaccctcgtggtgcccgtactgttgcgttggagaagccatcaccacgcgaatccacctcatggtacttccagcgctatattcagcacttcccagctgctggcgagatcgttttctttgaccgctcttggtacaaccgttccggcgtggagcgcgtcatgggtttctgcaccgaatcacagcatgcagagttcctgcgtgaggttccaatgctggaaaacatgatcctgggctctggtatcagcttgaccaagttctggttctcggtgacccgtaaagagcagcgcacccgttttgctatccgccaggttgatcctgtgcgtcagtggaagctttccccaatggacttggcttcacttgatcgctgggatgattacacccgcgctaaggaagagcagttccgttacaccgacactgatgagtccccgtggatcaccatcaagtcgaatgacaagaagcgtgcgcgtatcaacgcgatgcgttatgtattgtccaagtttgattacaccgacaaggattacgagctcgttggtgagcctgaccctaaggttgtgcttcgtgggcgcgaccagatcggtgactagtcactaggcgggcatgaaaa

SEQ ID NO: 2270 - protein, 306 aa, Corynebacterium glutamicum
MVGKLPIMAETNENDLPVIDLAQIEGYVVDDSDEDDPVLLRPDGTPIETWREDFPYEERVTREDYEKVKRSLQIELLKWQNWTKETGQRHIILFEGRDAAGKGGTIKRFNEHLNPRGARTVALEKPSPRESTSWYFQRYIQHFPAAGEIVFFDRSWYNRSGVERVMGFCTESQHAEFLREVPMLENMILGSGISLTKFWFSVTRKEQRTRFAIRQVDPVRQWKLSPMDLASLDRWDDYTRAKEEQFRYTDTDESPWITIKSNDKKRARINAMRYVLSKFDYTDKDYELVGEPDPKVVLRGRDQIGD

SEQ ID NO: 2271 - DNA, 411 bp, Corynebacterium glutamicum
  CDS (101)..(388): RXA01501
ctaacgaaatcgccggactcctcgcaatcacaagaagcgacgactagcctgtggggacaaactatttcaagaatttattcaacaaaggagttcttcacaaatgaaggaagtagcagtcaacgaagtcccagcaggcgcacagttgatcgatgtccgcgagaccgatgaatacgcagaggttcgagcacagggtgccgtcaacattcctatgagcgagttcgttggccgcatcgatgagatcgatctggaccgcgacatttatgtcatttgcaagctgggtggacgctcagctcaggttgccgaataccttgagcagcgcggaattgaagccatcaacgtaaacggtggcaccgacggctgggttgctgcaggattgccaaccgaggcataagaacccgccgcaaaagatcc

SEQ ID NO: 2272 - protein, 96 aa, Corynebacterium glutamicum
MKEVAVNEVPAGAQLIDVRETDEYAEVRAQGAVNIPMSEFVGRIDEIDLDRDIYVICKLGGRSAQVAEYLEQRGIEAINVNGGTDGWVAAGLPTEA

SEQ ID NO: 2273 - DNA, 732 bp, Corynebacterium glutamicum
  CDS (101)..(709): RXA01504
gcatgtagcgagtttgatgaagttgtcgcgataagaggaggggcgtgtcggtctgtaggattggctcgtaccgaacttagaaaactcatgggagtttcgcatgaatatcacgtggcttatcctggccggtgttttagccatcatcgctgtcgtgttcttttatctttcagcacagaagaaaaagagcgaaccgcagcctcctcgtcagcgtcaagatcctctgaaatttgccgacggatccgacacttttaatgcccgcattttgggtcctggagcaattatttcccgcggtggcgtggattatgtctgccgcggagccatccagttccgtcaaggccaatacatttggcacgagtatctactcgacggtggcaaaggcagtgagtacctgagcgtggaatacgatgagggccaactcaacctcggatggtggattacccgccctgacctggcacaacagcccgcacatgatgtcaccgtggagggcgttcgctaccgtaaaaccgaatctggcgtgggcaccttcacctccgaaggcaccaccggcgtggctgatcaaggtgaatttgaatactgggatctcgccgaagttggcggaaacaggttgctcagttttgaacgctacggcaaagacagtccatttgaagtatcgctcgggtggacggtgctgcccggcgaactcaccgtttacccagcaccagaggcctcatgattcatcacatcgattgcatg

SEQ ID NO: 2274 - protein, 203 aa, Corynebacterium glutamicum
MNITWLILAGVLAIIAVVFFYLSAQKKKSEPQPPRQRQDPLKFADGSDTFNARILGPGAIISRGGVDYVCRGAIQFRQGQYIWHEYLLDGGKGSEYLSVEYDEGQLNLGWWITRPDLAQQPAHDVTVEGVRYRKTESGVGTFTSEGTTGVADQGEFEYWDLAEVGGNRLLSFERYGKDSPFEVSLGWTVLPGELTVYPAPEAS

SEQ ID NO: 2275 - DNA, 621 bp, Corynebacterium glutamicum
  CDS (101)..(598): RXA01505
tcagttttgaacgctacggcaaagacagtccatttgaagtatcgctcgggtggacggtgctgcccggcgaactcaccgtttacccagcaccagaggcctcatgattcatcacatcgattgcatgcctacagatgtctccgccgaagcgctcggcgtgagctggaatggggaatcgccggaggtgctcgtcgataagcttatcgacgcatccccacaccccagcacctgccatttagcggtgattggcggctcgcatgtggttaccgttgaaacgcccgatgggcgtttccgggaagaaatttcctgccatgcacaagaagcggaagattcccgctggccgctgcccgacagcatcacgcgggaaaactacctgctgcaaaccaacgtcgccgtgctgtctgaggaagattttgcccgcgcagccgaagaaatctccaacggcgacgacgactggttgatcgccagtttccccggcgccggcgaacaccacctcaccgcgctgaccgcagaatttctggaagacgtatgggaatggtttagccaccacctctacccagaagagctcaccatcgtgagcacgaggagcatttacaaaccatgagctcccgaaactaccgaagc

SEQ ID NO: 2276 - protein, 166 aa, Corynebacterium glutamicum
MIHHIDCMPTDVSAEALGVSWNGESPEVLVDKLIDASPHPSTCHLAVIGGSHVVTVETPDGRFREEISCHAQEAEDSRWPLPDSITRENYLLQTNVAVLSEEDFARAAEEISNGDDDWLIASFPGAGEHHLTALTAEFLEDVWEWFSHHLYPEELTIVSTRSIYKP

SEQ ID NO: 2277 - DNA, 534 bp, Corynebacterium glutamicum
  CDS (101)..(511): RXA01506
cgctgaccgcagaatttctggaagacgtatgggaatggtttagccaccacctctacccagaagagctcaccatcgtgagcacgaggagcatttacaaaccatgagctcccgaaactaccgaagcataggattcatcctgctgtttttagcagtgttgtgcctgttcgctgcggtttttgccaagcctgcggtgggaagccaagtctccgaccgctggcccggaaacaacggcacctactcatgcgctggcgaaagtggggtggtggatgaaatcgtgaacatgtccaccccaaccgaccgcgccaccgaccccgcaactggcgatacttacctgcgatacagcaaaaacctgatcatcatctcaggtgaaggcacgccggaatgcaccatcaccgtcgaaggccttgaccgcgtcaacagtggtgcgttcatctggctcggcggcggtttcggcccatcctcaccaagcagttccagcggcggatcctccggttccggcggtggcgtgaaatagaaagaacactatgagtcaat

SEQ ID NO: 2278 - protein, 137 aa, Corynebacterium glutamicum
MSSRNYRSIGFILLFLAVLCLFAAVFAKPAVGSQVSDRWPGNNGTYSCAGESGVVDEIVNMSTPTDRATDPATGDTYLRYSKNLIIISGEGTPECTITVEGLDRVNSGAFIWLGGGFGPSSPSSSSGGSSGSGGGVK

SEQ ID NO: 2279 - DNA, 546 bp, Corynebacterium glutamicum
  CDS (101)..(523): RXA01507
gcgttcatctggctcggcggcggtttcggcccatcctcaccaagcagttccagcggcggatcctccggttccggcggtggcgtgaaatagaaagaacactatgagtcaatatcttgtcgacggagtgctcggcaccctttcatatttcgtgttggccgcagtgatcctcgtggtcggttttgtgattttggacttgatcaccccaggtaaactgcatgaactcgtgtttgtgcaccatctgcccaacgccgctgtgatcaccgtggcgcagcaggtttccatcggaatcatcgtggtcactgctgtgctgacctcctcagatattttgagtgaaggtttgctggagactgcagtgttcggtgcccttggtctggttatccaagtggtggtcatggcggtgttggaagctgtcattccgggacgtttccgtgatctcgtggaagatcccaaactccgttccggtgccgtcgtggccgccgtcatcttgatcgtggtgggaaccgtaaacgctgcatgtctgatttaggacccatctggcgctggctg

SEQ ID NO: 2280 - protein, 141 aa, Corynebacterium glutamicum
MSQYLVDGVLGTLSYFVLAAVILVVGFVILDLITPGKLHELVFVHHLPNAAVITVAQQVSIGIIVVTAVLTSSDILSEGLLETAVFGALGLVIQVVVMAVLEAVIPGRFRDLVEDPKLRSGAVVAAVILIVVGTVNAACLI

SEQ ID NO: 2281 - DNA, 870 bp, Corynebacterium glutamicum
  CDS (101)..(847): RXA01519
ctgggcggaatcgcactctcagctgccggactttatttagagcgaagctgtgaggctccgcctccccaatctggcgaagcgatcagctagattggaattcatgaatcaagacctgtcacacgaggattccggcgacggcaattctgtcgaccgtggacagattctgctagcagtactcattggacttgccctgattgccagcgtcatcatgctgctggccaacagtgacggcgccatgaaaatagcacttcttgcagcgctgtgggcggcaatcatcggattcttccttgtttatcggtcccgcaaacaagtcgaagctgctgcgcgggagaaggaaaccctcgaatacgcacaccaatctgaactcaaccgactagaagctgaactcgtccaagaaaaaatggagatttctgaatcccgtcgtgcacgcgatcaggaaacccttgaggaaatcaaacttcaactggaggaaatgcgcacccagctgtctgagctttctggccgtgaatggggctatgagccaaccatgctgcgtgccgaagcccgacgaatccttgagttggaatcccagcagctttcccagcagttccaggcaccgcagccagaagtcccggagcctgttgcagttccagagccaatgccggaacctgcaccggtgccggaaccagtaccagaacctgagccagttgaagttgctgtcgaagctgaggaagaaccagcaccaggtcgcagaaggcgtaggcacgcagctcccgaagaaactggcggacgccgacgcaaagatgaacgccaaggcggtttgagcgtggctgatcttctggcagcagcaaggaaaaaggaaaacaactaatgcaggctcctcgccttcgc

SEQ ID NO: 2282 - protein, 249 aa, Corynebacterium glutamicum
MNQDLSHEDSGDGNSVDRGQILLAVLIGLALIASVIMLLANSDGAMKIALLAALWAAIIGFFLVYRSRKQVEAAAREKETLEYAHQSELNRLEAELVQEKMEISESRRARDQETLEEIKLQLEEMRTQLSELSGREWGYEPTMLRAEARRILELESQQLSQQFQAPQPEVPEPVAVPEPMPEPAPVPEPVPEPEPVEVAVEAEEEPAPGRRRRRHAAPEETGGRRRKDERQGGLSVADLLAAARKKENN

SEQ ID NO: 2283 - DNA, 507 bp, Corynebacterium glutamicum
  CDS (101)..(484): RXA01520
ctgcatacctcgctcacgcacggcatcactgtgatggatccgctgcagacgtccggcaggcatcgtgatgtctgcgcacccgattggtcaggaccggtgggtggcgtccgcgttggatgagttgggggagaccatcgtggggcttttggtgggggagctcggtggctcgattgtcgagatcgccgatgacaagcgcgcacagttggctgcagcgctgacctatgccggatttttaagcaccttgcagcgcgatgcgtcgtatttcctggatgaatttcttggcgatcccgatgtgacctctgacatcgttatggattccgcacagcaattccaggcactgccttcgttggatgaggtcattgcccagtacgattcgattaacaaccccggcaggcaacgccttttccgggatttggcgcgcaggcaggcagagatttcccgcgcgcaagatattgagctgtgggcaattcagaaggaggaccgttgagtttcacgcatggtcagggc

SEQ ID NO: 2284 - protein, 128 aa, Corynebacterium glutamicum
VASALDELGETIVGLLVGELGGSIVEIADDKRAQLAAALTYAGFLSTLQRDASYFLDEFLGDPDVTSDIVMDSAQQFQALPSLDEVIAQYDSINNPGRQRLFRDLARRQAEISRAQDIELWAIQKEDR

SEQ ID NO: 2285 - DNA, 1074 bp, Corynebacterium glutamicum
  CDS (101)..(1051): RXA01523
aatcctccaaacctgtggatagaacaatctatccacaggttttcagttttctgcaaagttcatccttggcttcttatgccttcggatccatagtggggtcatgaaaaactggcaagaagaattccaactagtcaatctcacgaaacttctgcatagcgataccgagacttctgcggcaatcagtaatggtcaaatgattaaactcactcatgaagtcgcaatcaatgctgaaaagtaccgaagccttcctgcatgggataaagcagccgcccgagcttttgcagtgggtatgactgtggacaaagcagtggtagcggggcagtctgcggcgaggttatggggataccaaactttgactgttgagaaaaccgtgttgtgtctgttgccggaaaggctacgttcaaaatcctccaagcattggccgtccgggatgcgatataaagatcgttacctctcgtcgcgtgatattcgagaggttcatgggatccgagttacgggagcgttccgcacatttttggacatcgctttggatgatggggtggtggcggctgtggtcactattgattcagctcgaagacagaatccatcgcttacgcgtgagaagttaatgcacagtgcggaaagtttcccgaggcatcggggtgtgaaggcgtatcggcaggcgattgagttgtcgattcccaattcggatagtgctcaggagacgagggctcggttaatccttcgggaggccaagctcccggaaatccagtcagtgaaggtgcaggcccgtttcgatcaatcgcacaacaagtatttcctcgtcgatttcttgatcaatgagtggatcatcgtggagattgatggacgttcgaaatatgattccccggagctcaatgaggtgctcatggctgaacgcgatcgggagaaattcttcctcaatcagggctatgcggtcttaagaatcgatccgaaacagttagacctcaaccaagatggggagtgtgagttcatcggaatcctcaaaaacactttgcagaagaccccacctgagcacctcaagcaagccgcctaaacactccaagaaccaccatt

SEQ ID NO: 2286 - protein, 317 aa, Corynebacterium glutamicum
MKNWQEEFQLVNLTKLLHSDTETSAAISNGQMIKLTHEVAINAEKYRSLPAWDKAAARAFAVGMTVDKAVVAGQSAARLWGYQTLTVEKTVLCLLPERLRSKSSKHWPSGMRYKDRYLSSRDIREVHGIRVTGAFRTFLDIALDDGVVAAVVTIDSARRQNPSLTREKLMHSAESFPRHRGVKAYRQAIELSIPNSDSAQETRARLILREAKLPEIQSVKVQARFDQSHNKYFLVDFLINEWIIVEIDGRSKYDSPELNEVLMAERDREKFFLNQGYAVLRIDPKQLDLNQDGECEFIGILKNTLQKTPPEHLKQAA

SEQ ID NO: 2287 - DNA, 1845 bp, Corynebacterium glutamicum
  CDS (101)..(1822): RXA01525
gtctctgtagaaatctagggctttcgacgcttgagccccgcgcacctgcaaggtgcgctgtagggaggcgtcgacaagcatctttaagtagctttgaagcatgcgttcctttcaatcgatccttgacctggtaaattcagcatccgaggtggctaccaaaattgtgttgaagcgcttcgaaaaacggataaccagcgaaactgactgggtaccgtatcagcggtttagtctttggtcggttggttctccgctaacgatcgaacgcaaaggccccgatgtgcgtgtgagcaaggacaacactgccgttcttcagcgctatcaaagaccggaagcagaaggactgatcagctacttcatggatccaaagccatggataactgaattggcaggcctgaatctggacgatgtttccgaagatacagttgcaggtcggacagtattagtggttcccctatccaatgtcattctcagcatcgatgcggaatttgggatgattctaactgcggaaaacgacatagaaaagatccacgcaatatctgtcgaactcttagaaaaatggagatcatcccattaccctgagccgcattttcctgcagcggttctcccacctgcgtcgactggaaaccgcaacctccgagttctatgccctgagttttccattccaagtgtcaacgttggtgatcaggttttactatttttaacatttgatcaaaccctgccaccagtagatcagcttgaaactactcgccgcggatacactgatccaatccagcttgactacgaccaccgccaatacaggtttcacgccgacggttgggatgccatcatctccacggtggagccactacacgacgaagaagaactcacaggttacttcctgcaccgccttgacccagatagcgcgtacccaaccattgcagtcgttacagcagcgcactaccacggtacggacgcaattatcgacgtgaccctagatggtgtgcatccacccaaaaaccaagaaactcttgaaggcatcagcactagtaccagtgacggtgacatattttggctctccgatgaaagcttgcctttcgtccgtggattcagcgtgtcaacaggcgaactattacacgagatctccatccccacgttccaagagatcgtcctcgattccgctaatagagcccgcgtaaaacaaaagcaatggcctcacgatttcagtgattgcaagggaaaaacatgggagcttccggatcttaaagaagtattcgaagctgtcccttcgattccagcaggttggagattgttagacagcttcgggaaaaacttgcacaatgtcacacgcgaaaaccctcgtcttaatgacaacttttggcttcaaacaatccttaggcttaaaccatttaaagcagtagatcttgatatcggccgatcgataatcacagcaatttacccatacggtgatcgaatttacttacgcgctagtaaccaccacatcacgtttaaccaggacctcgagattctcaacgtagaagtctttggcgaccctgaggttcccgaatctggtctaatttatcttccacctggggattctccaacactcggttttcccaccggaacactcatgatgtttcatgagcaagaaggcacatatgctttccacgaccctgaaacaacagaacaaataacaactgtgaacttagacaggaatagtttttcagtggcatattcttcccgaaccaaaattgttatttcactgaaaaacccagaaagccgacctaccaacaagctgttggtgtgggaaccacaaaccgggtggcgagaacagaacctggagcgctgagcacgcttaaggtgaggtgg

SEQ ID NO: 2288 - protein, 574 aa, Corynebacterium glutamicum
MRSFQSILDLVNSASEVATKIVLKRFEKRITSETDWVPYQRFSLWSVGSPLTIERKGPDVRVSKDNTAVLQRYQRPEAEGLISYFMDPKPWITELAGLNLDDVSEDTVAGRTVLVVPLSNVILSIDAEFGMILTAENDIEKIHAISVELLEKWRSSHYPEPHFPAAVLPPASTGNRNLRVLCPEFSIPSVNVGDQVLLFLTFDQTLPPVDQLETTRRGYTDPIQLDYDHRQYRFHADGWDAIISTVEPLHDEEELTGYFLHRLDPDSAYPTIAVVTAAHYHGTDAIIDVTLDGVHPPKNQETLEGISTSTSDGDIFWLSDESLPFVRGFSVSTGELLHEISIPTFQEIVLDSANRARVKQKQWPHDFSDCKGKTWELPDLKEVFEAVPSIPAGWRLLDSFGKNLHNVTRENPRLNDNFWLQTILRLKPFKAVDLDIGRSIITAIYPYGDRIYLRASNHHITFNQDLEILNVEVFGDPEVPESGLIYLPPGDSPTLGFPTGTLMMFHEQEGTYAFHDPETTEQITTVNLDRNSFSVAYSSRTKIVISLKNPESRPTNKLLVWEPQTGWREQNLER

SEQ ID NO: 2289 - DNA, 2634 bp, Corynebacterium glutamicum
  CDS (101)..(2611): RXA01527
atttggcttttgcggatgagcggaagttggctaggcaggcgcatgatttgttgcctgagtttgctttgaaggaaaaggcggagggaaggtccaccccaaggtgattccgaaccccaacccgaaccccaaagccaaaactcttcgcctcgtttcagcgctgaccgccatcactgtggtgggttttagcgcttcacctgttcatgcgttgccgattccgttggatccttctgatccggcggtgtcggagttgtgggtgaatccgaatgcgcgggctgatgatgagctttctggtgtggatgtagagatctcggattttgtcatgccgaatagcaatctaactgtgcaggtgggggagtcttttaaggcgcaggttcgggtgactaatcgttcgtcggagacgttgagcaatattacgttgcaggcgcgtcgtgcggaggcgtcgtttgatatggcgagtgctcgggtggcggcgacggataataattatggctacttcggcgcgatggtgactcttgatgatgagttggagccgggggagagtgttgagactgaggtggagatttctaccgatagtttgtcgatttctcagccgggttcttatccgacgatgttggcgttgtcggggcagcttgatggggtggcgcagcatttggattcgcagcgtttccttctgccagtcctcagcgatacaactgatacagaagacaccgccacccccacgacgatgatttacccgatatcagcccagacgaatgtgttgggtggtgagaccggcgaggcgccggaagagccgcctttgctggtcagttccgacgcgcttgcgggcgagttggatgagggcggtcgtttgcaaaagcttatcgacgcctacctccagtcttcacccgccgtgcagcaagccacgtgccttgctattgatccgcagcttcttgatgtggtggatcgcatgaccggcggttacaccgtgaccgatactcgtcccagtacggtgcggcagaatcagcggcttcgtgagttgtggactgccgataatcaacccaccaatggtgtcgcgggcacgggtgcggaaaacgctgccattttcttggagaaactccgacaggccacagccacctcgtgcaccgtggcgttgccgtgggcgaatgctgatctaaatgcagtgagccaaaccggtaatcagtggttgatgcgcgaggcgctacagcgaggtgtcaccacctttgaagaagtgttgggtgttattccggaatccaatgtggtgattcctggaaatggttttgtggagccctccaccgtgggtgatctcggatgggcggaagtaacgcttaatccggatcaggcgtgggaggtgcagtcagaggagttggttgctgcccctgatgccacagagcaaagcgcattggataaccctaagccaacgccaggcacggtgacgccgccaacccctatgtcaacggtgtccgtgttggtttctgataacacggtgtggcgcacaacgagcgcggatcggttccactctttggctccgggaataactggggtgtcgtatcagggatcgttatcggcaaccttggctaccttgggacaaaaccctgagactgtgggctattccaatccggattcgcgttatgactacgccatggattctgagagcgcccgcaatctcaccggccaggcggcgctgcgcttgacggtggacaacggcgatgaagactctcccgtgttgatcatgccgagcgcggtgctgggcgccgaagacggcgcgatgttgcttgagaccaccggggctttgcttgccgacggctccgcccgacctttttccctgcagcaatatgtcactgccaatgcggaacaaagaaatactttggccacagcaacaactccaccggatgacactgcttttggtgcaccctacgacgatcctgcgtcattgacggaaaccgaaattctgcgaaccactcagcaggcggagtacatcgatgatctcactggcatcatgtccaatgatcccagcattgcactgacccgttatgggtttacagcaccgctgcggcaagatctgctgcgcgcgttgagtatcagtgagcgtcgttcgttagctcgccacacccaggcaacctctgctgccgataaattacttaatcgcaaccgcgatactctgcagaagctgcgtagctctgtggcgttgttgccgccgggaaatgtgtatacccgaacctcggaatcgtctccgttgttgattgtggcgcaaaacggtttgccattgcccgcggagactcagattttgtattccggaaatcaggatgcgcacatcaatactccgggtgtggttcgtattccggcgcagggttccatcaccttgcagatgactgcggatttgcccgatgacaatctgcgcactgatctcacgttgtggttggcatccccagatggggccaccattagtgaacctgtggaaattactgtccagcctcgcccgaatttgggcaccacgctgtttttcgtggcagcgggcattctggcagtaggagggttgttgtttatacggaagaaacgaaacgtcgaaaagcgctcgcccggtacgggatcgcccaaaccgccaccaacccactaacgtatcgcatagttattttc

SEQ ID NO: 2290 - protein, 837 aa, Corynebacterium glutamicum
VIPNPNPNPKAKTLRLVSALTAITVVGFSASPVHALPIPLDPSDPAVSELWVNPNARADDELSGVDVEISDFVMPNSNLTVQVGESFKAQVRVTNRSSETLSNITLQARRAEASFDMASARVAATDNNYGYFGAMVTLDDELEPGESVETEVEISTDSLSISQPGSYPTMLALSGQLDGVAQHLDSQRFLLPVLSDTTDTEDTATPTTMIYPISAQTNVLGGETGEAPEEPPLLVSSDALAGELDEGGRLQKLIDAYLQSSPAVQQATCLAIDPQLLDVVDRMTGGYTVTDTRPSTVRQNQRLRELWTADNQPTNGVAGTGAENAAIFLEKLRQATATSCTVALPWANADLNAVSQTGNQWLMREALQRGVTTFEEVLGVIPESNVVIPGNGFVEPSTVGDLGWAEVTLNPDQAWEVQSEELVAAPDATEQSALDNPKPTPGTVTPPTPMSTVSVLVSDNTVWRTTSADRFHSLAPGITGVSYQGSLSATLATLGQNPETVGYSNPDSRYDYAMDSESARNLTGQAALRLTVDNGDEDSPVLIMPSAVLGAEDGAMLLETTGALLADGSARPFSLQQYVTANAEQRNTLATATTPPDDTAFGAPYDDPASLTETEILRTTQQAEYIDDLTGIMSNDPSIALTRYGFTAPLRQDLLRALSISERRSLARHTQATSAADKLLNRNRDTLQKLRSSVALLPPGNVYTRTSESSPLLIVAQNGLPLPAETQILYSGNQDAHINTPGVVRIPAQGSITLQMTADLPDDNLRTDLTLWLASPDGATISEPVEITVQPRPNLGTTLFFVAAGILAVGGLLFIRKKRNVEKRSPGTGSPKPPPTH

SEQ ID NO: 2291 - DNA, 1365 bp, Corynebacterium glutamicum
  CDS (101)..(1342): RXA01536
agcatagatgacttgacactgttgcagcaggcggttttcacctggcctcttaggatttggtcaaatggttgcaacgacgccagggaaggaggcgcaccccatggcatttggattttttagtagacgtaagaaaaagaacaaagacaaaaacccgaatgaaaattcagcagtgcccgcacactctgaagattcacctcaggaggtttttgagggtaatggtcgtcaggtaggcgaccccattgaacagcaggttgatcgagatgctaaaggtcgtctcacagcggcggatttcttgccggacgctgatctgccacagctgaatcgttcgcgtgcaaatatgctgcgccgtgaattggagtaccgtttttcactccagaatgcccacattaatatcgatggaaacacggccatgattcagcgttcagatggcggggcagcacatgtctcgttgcgcaccctcgcgatgaatgcagctggccttgataactttgatcaactccctgaactggtggaaagcttcgttcacggcacgctggccgatgcaacattaaacgatctttctactgctgacctgtataaagcactgcgccttcgcctgctgccaacacctggcgaaggcgacgatctagttgagcatggactcgaccgggaaagccagatccgcgacgattcaatcctgcgcaccttcacctctgacatgtcgatcgcgctggtgctcgataccgagcatgccatccgcatccagccactcaaagagctcgaggagttcgatgacctcagcgccctagagcgggctgcggaccgcaatacctggcaagagctttacgacgcaaacgttgacgcttccttcgtcgacgctgaatcagacagcgaagggtcatcattttgggctttcgaatctaactcgtactacttgggtagtgcaccactgttcctcaacgatctgttggcaaagtgggcacctgacctggaccaaagtgatggcgtcatctttgctgtccctgatcgtgatctgttgattgcgcgtcctgtgaccaccggcgaagatctgatgaacggaatcaccgcgatggtgaggatcgcgatgcgctttggcctcgggaacccgacgtcgataagcccgcgcctgcacctgctgcgcgacaaccaggtgaccaccttcaccgacttccgcgtcgtctctcctgaaatggaagctgaatgggaagacagcgcgtttgacgcgccaccggccggcgcgatcggcattgaggtgcgcccagatccgtatctgatggagcgcctccaacagggcggctttggtgatttcggagatttcggcaagccccgcgatctagatatgtagcgaaaaagggaccttcactt

SEQ ID NO: 2292 - protein, 414 aa, Corynebacterium glutamicum
MAFGFFSRRKKKNKDKNPNENSAVPAHSEDSPQEVFEGNGRQVGDPIEQQVDRDAKGRLTAADFLPDADLPQLNRSRANMLRRELEYRFSLQNAHINIDGNTAMIQRSDGGAAHVSLRTLAMNAAGLDNFDQLPELVESFVHGTLADATLNDLSTADLYKALRLRLLPTPGEGDDLVEHGLDRESQIRDDSILRTFTSDMSIALVLDTEHAIRIQPLKELEEFDDLSALERAADRNTWQELYDANVDASFVDAESDSEGSSFWAFESNSYYLGSAPLFLNDLLAKWAPDLDQSDGVIFAVPDRDLLIARPVTTGEDLMNGITAMVRIAMRFGLGNPTSISPRLHLLRDNQVTTFTDFRVVSPEMEAEWEDSAFDAPPAGAIGIEVRPDPYLMERLQQGGFGDFGDFGKPRDLDM

SEQ ID NO: 2293 - DNA, 825 bp, Corynebacterium glutamicum
  CDS (101)..(802): RXA01540
ccatgcagcactatgggttccctgatcccgatgcgtactttgaccatgccactatcgcaggaaaacaccacacactcatcacaagaaagtaggtctcaccatgacttttgcagaacttagctcaccgcgtaccatcatcgcttttaatggccgtgccgaatctggcaaagatactgcagcacagtatctcacccatatgcacagttttcaccgcatcgcctttgccgatggtgtccgtgacgcactctatgcgcttaacccactggtctgtgtggagcaggctatcaccacacatggtgccatttatgaccgcgtggccactgttgtggacacacttggttgggataccgcaaagcaaatccccgacatccgcgcacttatgcagcgtattggtaccgaagctggttggcgcatccacggcgagcatctgtgggtcaatcttgctatcaaaaagatcaatgaactgcccgctgaccacgccattgtcatcactgatttgcgattccccaatgagattgagtggttgaacagcctcaaagccaacccgatgaacaccattcagaccgtcaaagtcatccgaccagatcatgaatcgaccttgactgcaggatcattcggtactacctcacatatttccgaaagctttaatctcactaccgacactgtgctccgcaacgatggcaccattgacgatttgcactcaaagctggctgattttttgagcacttccccgcagcccgtgctctctcgtaacgcccctgtaccaaaacacaacgcaccggcaccaaccactgatgccatgtaaataacccccgtatcaagatc

SEQ ID NO: 2294 - protein, 234 aa, Corynebacterium glutamicum
MTFAELSSPRTIIAFNGRAESGKDTAAQYLTHMHSFHRIAFADGVRDALYALNPLVCVEQAITTHGAIYDRVATVVDTLGWDTAKQIPDIRALMQRIGTEAGWRIHGEHLWVNLAIKKINELPADHAIVITDLRFPNEIEWLNSLKANPMNTIQTVKVIRPDHESTLTAGSFGTTSHISESFNLTTDTVLRNDGTIDDLHSKLADFLSTSPQPVLSRNAPVPKHNAPAPTTDAM

SEQ ID NO: 2295 - DNA, 2889 bp, Corynebacterium glutamicum
  CDS (101)..(2866): RXA01543
gtgctttagccaaggtgaggcatcaagagaagcaacagcgtcgttaccgtttttttggtgggggcgctgttgttgtagttaaagaaagagcggtgggaaaatgagtttgaaacaagccattatcgtgcgcaatgaatatacgattaagcaggcaaatggcaaaggttcacgaggatcatcgccaggtaaatatatctctggctatatggcacgcagcgatgcggtagaagcagtagcacctattgtgcgcaataaattagatgatttcatcatgcggtatatggcacgtgatagtgccgtggagcagctcaccacggacagtaacgcagactatgaccagcaacctgaaatgaactctcgtcgtggccggcaaggtcgccgcgcgaccttgaaacaacgtcgtgcagaacgcagcgcccggcgagcagcattgcgagcgggcgtgaatacagactccgacaccaccaacccatcacaacctgtgcacccgagggaactcgcggaatttactacccaggatgggcagcgcgttcatgatctcatgctgagggctcagggtaatgggggagtggcctttgggtatggcgatgtctcgctgtcacatgatgatcttcatgcagcaagtaataacgtccaagagctctatgaaaataggcataccgtgatgaaagtggtcctatcttttacccaggattacctgaccgcgcatggccttattccagaggatctcgatattaagcgtgctggtgattatcgcggccaggttgaccaaatgaagctacgcatggctgtcatgcatggtgtggatcgtctagcccagcgtcattatgatgatttgcgctatgtcggcgtgattcaggttgatacgaagcatgtgcacgcccacttgaccatggtggatgctggttatggacaccgggctgctgatggtacgcaaaaaggcaaaatcaataagccaggtaaggctattttgcggcgtggtattgacgcctggcttgatcagcatcagcatatggcgcacttgtcagcagcagtggggtatgaaaaacgcaatgtcaccagctacgtcaagcgctgggcgtttcatcagctcacccaagaaagtgctgcgcaatttgtggtcgcttgtttgccagaggataagcgactgtggcgtgcatcgaccaatgccaaggaaatggataagccgaatagattagtgcgcgagttggtggaggcgcgacttggtgagactgattcaccgatgccggcagcactgtcgcaggtctatcagtatgcgcaaaaacgccgcgttaaagaaggtttaagcaagcaggacacccagcgtttgattgataatggccgcgaaaagatcattgagcaggccatgaacggtgtctacagtgtcctatccgcgatttccgatgagcaacgcgatgtctctacggccatgttgacagtcatgcgtcaagactatgaggatttgctcgatggtattgcgcggaagaagagcaaggatctagacgagcagggtagtagtggatcacaagaggtggggaaagaagagcctgagccaagtattgaggaatttgggctgcgtttgcggtcgtattcagcacgcttgaatcatcaccgagaacaacgagaagcctttgccgtgaaaaaacgctcgtgggaggacgctaactctcaaggtttggctgatcccacctcacaggtaatgtggagtttttatgacactgaggagcagtatcatgcgatgtgccaatccaagtaccagcactttttgacctttgccccacctgtcggtcagtgggagaagcaatgggctgaggttgctgattacggtaaaagggttgtgggtctgcgtgcactgcgggcagatcgttctttggcacgcatgagcgatgaacgtgcagctgaagctttgggtcggcaactttatgaccaacccggtggtgggttattggctcgaacaggcgctgagggtaaagctgggcgtgcggtcctggatggccgaattgagcgcatgatggtgacctatcagcaaaaaattgatgatttgcgacgagaatgggcacagctcggtgcacgtttagaggttgaaggtgatgctgtattgatggatgcagcagatctacgtgaatctgggggagagggtgcagatgaacgccagatacagcagcaaacaattgagttgccggtcgctgatgtatctgattctgtgcgcacataccttgacgaagagttacgtgatagtcgtgatgtgagcgctcatgatccagtgcacaccttgcgtggcaggtttcaggtcgtgtttcgaccggagcatgattttgagcaggtgggtggccctgacctgcgcgatcttcactatgcctggtttagcgatcagaaggtcagtcagcccattgtgtgtagttacggtgagttagtcacccagcgacgttatgcttttgaacgcgctcgggagtggatgatcagttcgcagcaggaaccagaagcagtggcagaagagcttgatcatgccggcgcggacataactcgcatggaagcaaccagtagtgaggtatcccgtacaggtattttgcgtagtgccatgcttgccagaattagagagcaggcgcgacaacgcgctcagcgtgcagcggaagagcaggctcgtcgtgagcgtgagttggtagcacagcgacaacaagaaattgatcaggagaccacgcaaccagcgttcgaggtggtgcaacgacatgtacaaccggagtcggtgcagattaagcggggtagaacagttgcgctagataagcgagtgcagccactgattcgtgatgctgtggatcgagctgtgctggattcacagctgcggagtacccgtgatggtggattggggtaggcggttgattaaaaaaaaag

SEQ ID NO: 2296 - protein, 922 aa, Corynebacterium glutamicum
MSLKQAIIVRNEYTIKQANGKGSRGSSPGKYISGYMARSDAVEAVAPIVRNKLDDFIMRYMARDSAVEQLTTDSNADYDQQPEMNSRRGRQGRRATLKQRRAERSARRAALRAGVNTDSDTTNPSQPVHPRELAEFTTQDGQRVHDLMLRAQGNGGVAFGYGDVSLSHDDLHAASNNVQELYENRHTVMKVVLSFTQDYLTAHGLIPEDLDIKRAGDYRGQVDQMKLRMAVMHGVDRLAQRHYDDLRYVGVIQVDTKHVHAHLTMVDAGYGHRAADGTQKGKINKPGKAILRRGIDAWLDQHQHMAHLSAAVGYEKRNVTSYVKRWAFHQLTQESAAQFVVACLPEDKRLWRASTNAKEMDKPNRLVRELVEARLGETDSPMPAALSQVYQYAQKRRVKEGLSKQDTQRLIDNGREKIIEQAMNGVYSVLSAISDEQRDVSTAMLTVMRQDYEDLLDGIARKKSKDLDEQGSSGSQEVGKEEPEPSIEEFGLRLRSYSARLNHHREQREAFAVKKRSWEDANSQGLADPTSQVMWSFYDTEEQYHAMCQSKYQHFLTFAPPVGQWEKQWAEVADYGKRVVGLRALRADRSLARMSDERAAEALGRQLYDQPGGGLLARTGAEGKAGRAVLDGRIERMMVTYQQKIDDLRREWAQLGARLEVEGDAVLMDAADLRESGGEGADERQIQQQTIELPVADVSDSVRTYLDEELRDSRDVSAHDPVHTLRGRFQVVFRPEHDFEQVGGPDLRDLHYAWFSDQKVSQPIVCSYGELVTQRRYAFERAREWMISSQQEPEAVAEELDHAGADITRMEATSSEVSRTGILRSAMLARIREQARQRAQRAAEEQARRERELVAQRQQEIDQETTQPAFEVVQRHVQPESVQIKRGRTVALDKRVQPLIRDAVDRAVLDSQLRSTRDGGLG

SEQ ID NO: 2297 - DNA, 723 bp, Corynebacterium glutamicum
  CDS (101)..(700): RXA01544
ctagatctataacgaggatcggcgctactttaagcatgtttgtgctgttggcgccgattttttcatagctgtacacacataaggcaacaggagaaatacagtgaaacttgacgacgctatggtcatgatcgaacagcgcctggtcaaaggtcgcggcgcaaccaagacgcaactagcaccctatgagcatatccagcgcaatattgcagcccgagggttgagagccgatgacggaggctcgtgcttcggttatggggatgcgtcgctgagtaatgacgatgtagcaactgctgcagaagatattcaggatttgtttgcgtgcgggcatacggttatctcagcgattgtcgtttttgataagagctatctcagtgagcatggaatcatgagctttgatccgaactattttggtcaggatatttatgcggacacccatccagagattgatctcatggaattgcgtttagccgtgatgaatgggctcttggggcttgagggaacgttttttgaggatatgcgttatgtcgcatctatcgaggtgagccggagctatgtctatgcgcacataatgatggcggatgcaggcgttgacgatgcacgcggtaatgcacaggtgaagattacggacaccgaacgagtgctgtttagacgtggtgttgaatcccggtttgtggagcaagaggcacgcaacgtcgtgctttagccaaggtgaggcatcaagag

SEQ ID NO: 2298 - protein, 200 aa, Corynebacterium glutamicum
VKLDDAMVMIEQRLVKGRGATKTQLAPYEHIQRNIAARGLRADDGGSCFGYGDASLSNDDVATAAEDIQDLFACGHTVISAIVVFDKSYLSEHGIMSFDPNYFGQDIYADTHPEIDLMELRLAVMNGLLGLEGTFFEDMRYVASIEVSRSYVYAHIMMADAGVDDARGNAQVKITDTERVLFRRGVESRFVEQEARNVVL

SEQ ID NO: 2299 - DNA, 1374 bp, Corynebacterium glutamicum
  CDS (101)..(1351): RXA01545
ataagaaccgacacgacgccctcaacgacgctgttgcagcagctcgcaactagctagttaccacgcctgacacacgatacgtagagaaaagagaaatgatatgaagcttgcaggttttaacaccaattcacccgcagcgcagcgggttgccgaacagggtgaaaaggtacagctcgatgcaccggtgtacgcggtgtttaccccagatgttgttgaagttgagtttattggcacgcagcatgagccggtattgcacgttgagggtgccatcgacagcgtgactgcattgtcgcagctaccgtacgacattcaaaaaattacgtttgattcagaaaaccaacagcgttttagtggattttataaattcagtccacagcagcataaagagctcattgataaaggtctgtatctagaaggtttccagccaccgcgcgagatgatgacgagcctgccgtgggaactacccatgaatgccgatgtcactgtcgtggcaccagagtcgcaggatgcgccaccgattgtgcttgtgggcttatctgagattcatggtgtggattttagtcaagaatcctctggctatgagctcaccagcatgtttgaggactaccgtagccagcgtgaagcgggcgaggcggacaaggatttctctgagtcaatttctcgtgcagagattgaaggcaaagatattttcgctgatgctaaccgcacccgtaccggtgtcagtgcacatgcacagcgccttgagcaggagcgagcgctgagcgcagcacagttgatggcgaaacttgctggcatttccttccagactgaacccgtgcttgttggtgcggaagagagctttgatgctgagcaattcctcgcccatgatcttgatgacaccgctggtatgagtgagtgggagcgcgaggttaccgagttctacaacgagaagattcgcgcccaggagcctgtggtggagcgggaggctgagcgggatagcgatattgagactgaggttgatgcagcaccaactgtcagtgctgcagagattaacgatgttattcatgatcttgatgagcttgaattcgatgacgtgattgatcttgatgcagatgatgttgtcaataccgccgaggtagaggcgccagcaagtgtcagtgctgcagagatttctgcgacagagcttgattttgatcgcgagtcacgggctaagaccgcgcagcgagaagccagccgacgtgttgcacagaagattcagactcaagaatctgtgcgtgaggcatatattcgcgagcaaaagcatggctatgacgcatcacctgcggaggggcgcaagtttgatgagaaaattgcagaacgcgggctagatctataacgaggatcggcgctacttta

SEQ ID NO: 2300 - protein, 417 aa, Corynebacterium glutamicum
MKLAGFNTNSPAAQRVAEQGEKVQLDAPVYAVFTPDVVEVEFIGTQHEPVLHVEGAIDSVTALSQLPYDIQKITFDSENQQRFSGFYKFSPQQHKELIDKGLYLEGFQPPREMMTSLPWELPMNADVTVVAPESQDAPPIVLVGLSEIHGVDFSQESSGYELTSMFEDYRSQREAGEADKDFSESISRAEIEGKDIFADANRTRTGVSAHAQRLEQERALSAAQLMAKLAGISFQTEPVLVGAEESFDAEQFLAHDLDDTAGMSEWEREVTEFYNEKIRAQEPVVEREAERDSDIETEVDAAPTVSAAEINDVIHDLDELEFDDVIDLDADDVVNTAEVEAPASVSAAEISATELDFDRESRAKTAQREASRRVAQKIQTQESVREAYIREQKHGYDASPAEGRKFDEKIAERGLDL

SEQ ID NO: 2301 - DNA, 819 bp, Corynebacterium glutamicum
  CDS (101)..(796): RXA01546
atagttagttggtgactagctattgggggttttgtcttttaatattataaaaagaaagtgacaaacatacttgcattaaaaaggaattgagataggcactatggcacgagcgaaaaataagaaacagcgtcaattgcagcacgctcatgatgcagcacaggctgagattgcagaagcggtagcggttaacacggttgaaccaattaatgcacgcaccggtggatggccttcgtgggtcgataaggtctggaagctcactggttcacttggtggttggtttgctttcctggtttttgccatcgccgtgtggccggtagcgatccttgcagctggcactgtggtcaccatcatcggtacgtggggagtatcagtactgccaagtctggttatttccagcatcggcgcttctgctggtgtgattatctccactactgatgggttcctctttagctgggtcatcccggtgctgtttctcatgattgtgctggcactggtggtcatgaaagtgctcaatcttatttttggtgcattgtggcgcttcaccatgactttgcgacaggggttatacgcaggtcgtgaaaagatttctcgcgacgacgcgaagcgcgcacgagcagaaaagaagctgactaagcagcaggctaaagaagccaaaaagcagcgcaaacttgatgccatttactcggctcaacaggctgaagagactctggcgcaacaggcacagtctgagccagaagagtcagacgataagaaccgacacgacgccctcaacgacgctgttgcagcagctcgcaactagctagttaccacgcctgacac

SEQ ID NO: 2302 - protein, 232 aa, Corynebacterium glutamicum
MARAKNKKQRQLQHAHDAAQAEIAEAVAVNTVEPINARTGGWPSWVDKVWKLTGSLGGWFAFLVFAIAVWPVAILAAGTVVTIIGTWGVSVLPSLVISSIGASAGVIISTTDGFLFSWVIPVLFLMIVLALVVMKVLNLIFGALWRFTMTLRQGLYAGREKISRDDAKRARAEKKLTKQQAKEAKKQRKLDAIYSAQQAEETLAQQAQSEPEESDDKNRHDALNDAVAAARN

SEQ ID NO: 2303 - DNA, 786 bp, Corynebacterium glutamicum
  CDS (101)..(763): RXA01547
tgcagcgggcactagagatcgctcagctgaacaaacaggagaacagataatgacgacacgaaatgtagataaccagagtggtgtaactgaggacgagccgatgttcgatcaggtcaagcgcttttttgttcgcaatatcgtcatgatcattgcgttgatcttggcagtggtggtcattattgttgccaccagcacctctgcggatcgacatgctgtacttaagcgtcaaactggtgagattatggccttgcaacaggaacgtgatgcattaaacagtaagcttgagggccaacttgagcaggtggtgcgtgacgctaccggtggtatggatattgaacacaaggctgcagatgatgctgttgttcgagaatttttgtccatggcgctgacgtgggacagcgtgcgcgactaccttgatgtgcgcgagcaagtgatgcgggtttatgacctggatgaagaatcacagtttatgtcggtgtttatgcctggtgaaatggcgggcattgctcgcaccgatccaactggcgaagtgcactatgcctatgatgcagatctgtccaaccgctttagcagcttagaatccgtggttactcgcattaatggtacagagtacagctatgtatccacggtgacgatgaagtcgaagcgctctggtggtgaggcagaaacaacctctacctcacgccttgcctatgacgtgatcgacggcaaaattcgtaacctcgaagcacgtactgtccccggtggtgtgaaatactcgggctaaaagtttctggggcaaccccc

SEQ ID NO: 2304 - protein, 221 aa, Corynebacterium glutamicum
MFDQVKRFFVRNIVMIIALILAVVVIIVATSTSADRHAVLKRQTGEIMALQQERDALNSKLEGQLEQVVRDATGGMDIEHKAADDAVVREFLSMALTWDSVRDYLDVREQVMRVYDLDEESQFMSVFMPGEMAGIARTDPTGEVHYAYDADLSNRFSSLESVVTRINGTEYSYVSTVTMKSKRSGGEAETTSTSRLAYDVIDGKIRNLEARTVPGGVKYSG

SEQ ID NO: 2305 - DNA, 1131 bp, Corynebacterium glutamicum
  CDS (101)..(1108): RXA01548
ggcgtgcgagctgctggttggcgcttgtgcaccccgtttttgtgtaataacttatattctagaaacttcaataacttagtaactttaaaaggggtttaatatggctgagaataatggcgggtcggatgaccttaagcccatctctgtcgatggggtcgtcaatggggaagtgcgcagcgacaaagaaaagcaggcgttcgagaagattaccggtgatgatctgcgtcgtcgtgcagaacaaatccgtaaacgtcgtttagcaaaagcgcaagaagatgcacgtaagcgtaagccattgtttggtttgggtcgtatcgctgtcacagtactggctggcgccgtatttattggtacaacgttgtggatcagtaccacctcgggcggctttgacgacaaggtgagtgcaaacaatgagcagattgtcactctgcgtaatgaagtcaacgacttaaaaaacactgcagagacaatgcccaaaaaagagactcttgctagtcaatttgacgcagcaacctcacgtgcacagaatgtggctgacttacagaatcagttagccggcattattaccagtgttgatgatgatgccgcgaccgagcagttcaagacaattgttgatgagctgaaaccgaaattcacggtctctgctggtacgacaggtgaatttcctgcggcgggtcgttggtaccagccacaagaagttgttgtcggagataacaaccgacccacctgggcgccgatgggggctgagtcctggggatggactgtgacccctacactgtcgatgtcagataccgagcacgttgtggtgatgtgggaggcccgcttgaccggaggtgagcgttacggtgcgctgttggcgtgggtgacagccgattacaacatcaacaccggcgtgtttagctcgctggcgttggcgcatacctatgaaggacaccagcgtattggtgcaaccacctcaccaagtgaatttggtgcccacggcacaaatgcagaggcgagcgctgcacgtgctggcagtgaaggcggggggcttgagggcgaggctattttcgttgatgagctgcagcgggcactagagatcgctcagctgaacaaacaggagaacagataatgacgacacgaaatgtagat

SEQ ID NO: 2306 - protein, 336 aa, Corynebacterium glutamicum
MAENNGGSDDLKPISVDGVVNGEVRSDKEKQAFEKITGDDLRRRAEQIRKRRLAKAQEDARKRKPLFGLGRIAVTVLAGAVFIGTTLWISTTSGGFDDKVSANNEQIVTLRNEVNDLKNTAETMPKKETLASQFDAATSRAQNVADLQNQLAGIITSVDDDAATEQFKTIVDELKPKFTVSAGTTGEFPAAGRWYQPQEVVVGDNNRPTWAPMGAESWGWTVTPTLSMSDTEHVVVMWEARLTGGERYGALLAWVTADYNINTGVFSSLALAHTYEGHQRIGATTSPSEFGAHGTNAEASAARAGSEGGGLEGEAIFVDELQRALEIAQLNKQENR

SEQ ID NO: 2307 - DNA, 1101 bp, Corynebacterium glutamicum
  CDS (101)..(1078): RXA01552
actttgctctttttatggcgctgcacgagattcaactcaaagtgaaggtcagctatttgaactcagtgcaaaagatgatcggcataccaaactaatgaagatgtatctgggaatgaaagaagattccctagcgccaccccaaaatagattcgagtctcataagactgtcttttccctaaaacagaaaaacatcccaattaaggatgctgctaaatctgatcaggtgaatctcacttggcatgattatccaggtgaatggtttgagggtggagctgtaacggactcggaaaagcaggataaagttgaaacgtttagaaacctgctgggctcagatgtagcgctatttttagttgacggtcaaaagctgcatgattacgccaatgaagaggagcgctatcttagctatttatttgatggattcattgaaaacctaaatcagatcaaagatgcaatcctggagggtgggaaacagctccaacagttcccacgaatttgggtaattgctttatccaaagctgatctatggccagatctccaagtaaaagattttgagaatctacttaataagaaagctggcaatgaaattattgcgctgcgttcaaagcttttggagtttatcgataacgacgaagctttctccttcggtaaagatttccttttgctctcttcggcgaagttcactccaggccatattgatataagccagcgcaagggtgttgatgtcctcctcccgttggcttgtgtattgcccatgcaacgccatttgtggtggcaggagctgaaagttttgccaattaacctggctgatatacttttgggaaatgaaattgcccaaatgggtttcaagatcgtttccaaagttttgaaaaacaaagtatctggaacaaataacaaggcgatggcggcattggttttcgctgaacttgtgagggatatggttgatcagccaactgaattgcttcagaaggctcgtgaggaagccgtcggaaggcgtgaattccttaaagcgattactgcagaattcaccaggaagctgaatcaagccgaagctgatcaggttttagttcgggactttgcatgacactcatgtgggcaacccgt

SEQ ID NO: 2308 - protein, 326 aa, Corynebacterium glutamicum
MYLGMKEDSLAPPQNRFESHKTVFSLKQKNIPIKDAAKSDQVNLTWHDYPGEWFEGGAVTDSEKQDKVETFRNLLGSDVALFLVDGQKLHDYANEEERYLSYLFDGFIENLNQIKDAILEGGKQLQQFPRIWVIALSKADLWPDLQVKDFENLLNKKAGNEIIALRSKLLEFIDNDEAFSFGKDFLLLSSAKFTPGHIDISQRKGVDVLLPLACVLPMQRHLWWQELKVLPINLADILLGNEIAQMGFKIVSKVLKNKVSGTNNKAMAALVFAELVRDMVDQPTELLQKAREEAVGRREFLKAITAEFTRKLNQAEADQVLVRDFA

SEQ ID NO: 2309 - DNA, 2265 bp, Corynebacterium glutamicum
  CDS (101)..(2242): RXA01554
tggcttaaaccttatttgtagttgtcaataaatatgaaattccttagcaacttgtttaaatagacgtataaacaagtttgaaaaaggaaggttatccatcttgaaaaagcatgtgacctcagccgttaccgccgtggtgacggctttttcaacggctgcgcttggtttaagtattgccgtttctcctgctgttgcccaagtggctaatccagctccagatctttctgcgccgtatacatgggtggaagagtttgattccgaggatgctctcaaagggtggaacattttccgccagccagattatggcagcgacaaagttctctataccgaagatgctttaagtatcgaagatggcaagctcaccatcaccactcagcgccactgcgttgacgaagacttcgcgatcagtgatcctgtcaaccgcggaaagctcaatgacagcaccgcgcaagttgaaccttgtgctccaggtcagtttgaaaagttcaccagtgcgcgcatcgtcactccgaaaattgctcgtggagagttcgacctttctgtcactgcaactcttaacaccggtggcgtcgaaggtgtccgaagtgccatttggatgcaaaacggtgaacaggcgtgttcctcagcaaccaacaatggcctctacggagaactagacctggtagagcacttttcttacgatcttcgctcgccatggtctccatcaaacacccacttgggttgtgatcctgaaagtgtcaacggcaccaaccgtgcacctcgtgaacttaaactagatgagtcactcgatggcgtggagcacacctggactgtgagcaccacccgcgacggcgttgagtacttcattgatgatgaggcgattaaccgccagtcatggcgcaacgatgtcactttggggcatgccgaaattgatgatttcgggatctccgcgcagacgtttgatgagatcgtcgaccgcgaatggactctcactcttaatcaaaaggtagaaagcgccgactgggcaaaaccacgttcctctgaggaagatttcccagtccggtccatggtgattgaccgcatcgaggtcaccggatctcccgcagtatctgaagacacccccatgccagataccacccagcttttgacccaagacactctggaatacctcggtcgcatgccagtgctggaacgctacgagccagcaagtgctgattttgccgatggccgcaggccttcctggaactacttcaatttgaaggaatcgtggcagaatccagaactcgagcaacgcccagaagctgtcgaattcgttgatggacgcatggatatcgtgacccgtcgccactgtctggccaccactgatgacatcgccactccggaaaacgcacaggaggaaccgtgcgcgccgggtgaggtgacacgctacagctcagcgcgtgtccaccttccagagatccccgccggcaacttccggctcaccgtgcgcgcacgggcgcagtccgaagagcttgtcgacggcgtccgccccgctatctggatgcagaacaataccaacttctgtgctgacaacgatggacgcccttatggtgaactggatattactgagttctacagctctcgtgtgaacacccagtactcggcagtacaccttggatgtgctggcaaccgcccagagatgaagcttcgccaaatggaaatggaagagtccatgtttggggattggcatgactggggcgtcgaagtcttcgacggccagatcgtattcaccattgacggcaaggcagtaacttcctctggcaaagatgtctttggcaactctgttaccccagccgctgcacctcttcgccccgcgcacttcaagttgtcggaagaggaataccgtgaagtcatcgggcagccttggcaccttattttgaacaccatggtggagcagtctggcaaagacagctggattacagcggtcgacaataacgaggcgttcccagaacaccgcttccaaattgaccatgtggcagtagatatcgagtctgactctgtggacaatgtatggcctgacgctgcgaatgaaatcccagacaatgttggtattgaagactctgatgatggcagcgacctggaggttggttcgaccggaagctctacagctgagaccgtgagctggatctcgttgttcaccgcgttgagctcgctggtcttcacactggctctcaatcaagaagcattgcagaatttgattaatcagttcatgagacagttcaagtaatccttgtgggcgctttgtct

SEQ ID NO: 2310 - protein, 714 aa, Corynebacterium glutamicum
LKKHVTSAVTAVVTAFSTAALGLSIAVSPAVAQVANPAPDLSAPYTWVEEFDSEDALKGWNIFRQPDYGSDKVLYTEDALSIEDGKLTITTQRHCVDEDFAISDPVNRGKLNDSTAQVEPCAPGQFEKFTSARIVTPKIARGEFDLSVTATLNTGGVEGVRSAIWMQNGEQACSSATNNGLYGELDLVEHFSYDLRSPWSPSNTHLGCDPESVNGTNRAPRELKLDESLDGVEHTWTVSTTRDGVEYFIDDEAINRQSWRNDVTLGHAEIDDFGISAQTFDEIVDREWTLTLNQKVESADWAKPRSSEEDFPVRSMVIDRIEVTGSPAVSEDTPMPDTTQLLTQDTLEYLGRMPVLERYEPASADFADGRRPSWNYFNLKESWQNPELEQRPEAVEFVDGRMDIVTRRHCLATTDDIATPENAQEEPCAPGEVTRYSSARVHLPEIPAGNFRLTVRARAQSEELVDGVRPAIWMQNNTNFCADNDGRPYGELDITEFYSSRVNTQYSAVHLGCAGNRPEMKLRQMEMEESMFGDWHDWGVEVFDGQIVFTIDGKAVTSSGKDVFGNSVTPAAAPLRPAHFKLSEEEYREVIGQPWHLILNTMVEQSGKDSWITAVDNNEAFPEHRFQIDHVAVDIESDSVDNVWPDAANEIPDNVGIEDSDDGSDLEVGSTGSSTAETVSWISLFTALSSLVFTLALNQEALQNLINQFMRQFK

SEQ ID NO: 2311 - DNA, 453 bp, Corynebacterium glutamicum
  CDS (101)..(430): RXA01560
atgggagcaaggctcatttagctacttcgacgtggaagcgcacatcgttgagttgattcctgcatcagtaagcgatgcgttttaggcacatctgcgatccgtgggcgtgtcctacatcatcgccggcgatgagcagctggatatggcagaagccgttcgcaaaattggggagacctttaaaactgaggaaattatccttggtggcggaggaaccctgaactggtccatgctccgcgacggtttgtgcgacgaggttagcatcgtgatgatgccaatcgccgatggtgaaaagcacacccactctttgttcgaagccgatgaaaaatactcagcaccgttgccgatcggtttttcactcgccagcgttgaaccactagaagatggaagcgtttggatgcgttacggggtcaatggcccagtggacgcgaactaggtagcaaatactcgctcttt

SEQ ID NO: 2312 - protein, 110 aa, Corynebacterium glutamicum
VGVSYIIAGDEQLDMAEAVRKIGETFKTEEIILGGGGTLNWSMLRDGLCDEVSIVMMPIADGEKHTHSLFEADEKYSAPLPIGFSLASVEPLEDGSVWMRYGVNGPVDAN

SEQ ID NO: 2313 - DNA, 1143 bp, Corynebacterium glutamicum
  CDS (101)..(1120): RXA01575
gctgttttttgatgcatccatgataggaatagagcctagtgcatgatggctgattttcctgttaggtgccaccgaccccagtgatgataacttgattgtcatgaaatccattgatcttgagcagctggcgggcacgcaatcgcgcacgtatcaatcgcgaaagatcaccgatgagatggtcgcccggccggtgcatgtggcgatcgcgctgtgggaagtgccgtgggagtcggcaaaatccggcaagattgagggttgggtcattgccgtggattcgccgcgtgggcggtttgtgcgcagcgggcagaccaaaaatggcgacgccgtcaaccggactgtgtcgatgctgaaatcagcgttgaaaggggtccgcgggaaggcgtggattgtaactgggcgtcgacaagcagctttacgcgcagccctggtgcgcgaaaactacctggtcaccggaagcttcgccgagcaaaatagggccggcgtgaaggcgtcggcgatctcgcgccgcgccgaacaatccgcgctctacaaggcgaaaaaaatcggcgaattcgccgagcgcgccccacgcgtcaaagagcggcaagaggcacattggtggccacggttgtcacgcacgcaaggcaccgcaggcgttttacgcttagcgacggacgcctctaccgatggggtcttccgcggcgccatgtgcttcgtagcctcaaacggcgactacctcctggagacccaagacaccaccgcaagctccgacgaattagaactcgaaagcatcacccacgccctgatctacctcaaaaccatcggcgcgacccaagccatcatcgaatccgacagcaaagccgcacttgaagccatcgacttcatcctcaacaaccgaccgcgccggggcaggtggcgcggcatcaccgcatgcgcccgcaaccggttccgggatgcctgggaagcgcttatcgacgactgcgttgtggaattatcccgcgtactagggcacgccggggatccactgaaccaagcagccgaccaaatcgcatacatgggcatgcgcgccgtaatttttgaacaaaaatccgcacaccccacattgctcaaaggaattgacaaggcgcttcgcaaggccgagtaaggtgggcaacgagtcggtga

SEQ ID NO: 2314 - protein, 340 aa, Corynebacterium glutamicum
MKSIDLEQLAGTQSRTYQSRKITDEMVARPVHVAIALWEVPWESAKSGKIEGWVIAVDSPRGRFVRSGQTKNGDAVNRTVSMLKSALKGVRGKAWIVTGRRQAALRAALVRENYLVTGSFAEQNRAGVKASAISRRAEQSALYKAKKIGEFAERAPRVKERQEAHWWPRLSRTQGTAGVLRLATDASTDGVFRGAMCFVASNGDYLLETQDTTASSDELELESITHALIYLKTIGATQAIIESDSKAALEAIDFILNNRPRRGRWRGITACARNRFRDAWEALIDDCVVELSRVLGHAGDPLNQAADQIAYMGMRAVIFEQKSAHPTLLKGIDKALRKAE

SEQ ID NO: 2315 - DNA, 498 bp, Corynebacterium glutamicum
  CDS (101)..(475): RXA01577
ccgtagacatcctctacaccgaatactccatgagcaaggggcaatccctgctcaacggcgtaaacatcctggccgacggcttcctagcgaggagactcccatgacgcagaccaccacccaaatcatcatccagatactgcttctcctggcaaccgcagcactggcactatatttcctccgaaaccgccgcaaagcccgcgccaaagcatgggtgaaaatcggcttcgtagtattcattttcgccgcagtatgggcagtgctccgccccgatgacctcacccaactagccaactttgtgggcgtggaccgcggcaccgacctaatgctttacgccctggttgtggcatttatgttcaccacgctgtccagttatgtgcgtttccgtgaacaagagctgcgttattccaagctggcccgcgctgtcgctttgcaaaatgtggtgctgccggaggattcccagggttctgaccccgcttaggaaagcgcttggcctctgga

SEQ ID NO: 2316 - protein, 125 aa, Corynebacterium glutamicum
MTQTTTQIIIQILLLLATAALALYFLRNRRKARAKAWVKIGFVVFIFAAVWAVLRPDDLTQLANFVGVDRGTDLMLYALVVAFMFTTLSSYVRFREQELRYSKLARAVALQNVVLPEDSQGSDPA

SEQ ID NO: 2317 - DNA, 507 bp, Corynebacterium glutamicum
  CDS (101)..(484): RXA01579
tggcagcatcctgcgcaaggttgggcagcagaccattcattacggcgaatacaccggtcattgtgagaagggtgctcagcagcaatgcccaggtgcgtcgttgaccgaggtattcaacactgaccagcgggtgcttaacgcgcttttcaatgttgtagaagaagatgactccggcgataccgatgatgaacagcacaaccaccagaatccagttcgcggcaccgagtttgccggcctcgttgaaagccatgagcaaagatccaatggacaccgccagtggcagcacaccaagccagtccatcttcggggtttcttcagcggtggattccttcacgctgaaaggcagtgcgagggcagcgacagcgcagaaagcagccatgacccagaagatggaacggaaaccaagtgtttcagccaaccagccaccagcaagcgcgtccacgccgccgataccaccgttgacagaggtaacaattccgagaagtagcgcatattgcttttcattgg

SEQ ID NO: 2318 - protein, 128 aa, Corynebacterium glutamicum
LTEVFNTDQRVLNALFNVVEEDDSGDTDDEQHNHQNPVRGTEFAGLVESHEQRSNGHRQWQHTKPVHLRGFFSGGFLHAERQCEGSDSAESSHDPEDGTETKCFSQPATSKRVHAADTTVDRGNNSEK

SEQ ID NO: 2319 - DNA, 750 bp, Corynebacterium glutamicum
  CDS (101)..(727): RXA01585
tgcagactgctgcgccccgttccatcagcaaggtggagcgcaaggtgctgaccgctgtcgctactgatgaggtgcagtcgcaggaagctctagaaaagtagtggttgagactctttctatcacctcaggtgcggctggcctgcaggcgcttgttgcgcgtgcggttggtttgaatgagttggcgagcgcgcgtttccgccagctcacgccagaggtcgttgatgtttttgtcaccactccgttcaacgtgacggcgtcgcgccgggtatttggtgtggcgggtcgcgatggcgctgcagttggcgcgaaggatttgctgcaggcactcagcgagggccgggaagacgtaggcacctcccgcgacgccagctggccgggctcattgccgccagccacgggctttacgcttgtcgacgaactccccacccacgtggtgcgcactttggctgatcagggtcaggcattggctcgccagttctccggcccgcttggccctccggcttcgttgatggatcaggaagttatttcagcagaaggcaatggcaagaaggccggaatcccgatgcgcacggtatttacctgcacttcgcttggtttgatcccaggttttgaggcagccaatgatgtgccgaggcacctgcgggtatcggtgaatggtcgttggacccgcgttgatgctccctatggcagtgtttatcactcgtcaggtttgggtctgagcgttttctaaagcaagacccagcctgcaag

SEQ ID NO: 2320 - protein, 209 aa, Corynebacterium glutamicum
VVETLSITSGAAGLQALVARAVGLNELASARFRQLTPEVVDVFVTTPFNVTASRRVFGVAGRDGAAVGAKDLLQALSEGREDVGTSRDASWPGSLPPATGFTLVDELPTHVVRTLADQGQALARQFSGPLGPPASLMDQEVISAEGNGKKAGIPMRTVFTCTSLGLIPGFEAANDVPRHLRVSVNGRWTRVDAPYGSVYHSSGLGLSVF

SEQ ID NO: 2321 - DNA, 392 bp, Corynebacterium glutamicum
  CDS (1)..(369): RXA01586
aacaacgcggcgttcattgagatcgcgcaggaagctcgattggcgtttgcggaggatcagttccgtgagcgtggctatgagatccctgctgtgtttgtgcgccacttggaagttgattatttgcgtgcgatcttgccggataccacccaggctgtcgtggagacacaggtgaccaagatcggtaatacttccttcagcactcgtcaagaggtcaaggatcgtaacggtcgtgtgtgctgcgtggttgagtgcgtgcaggtggctgtcaatgtgcagactgctgcgccccgttccatcagcaaggtggagcgcaaggtgctgaccgctgtcgctactgatgaggtgcagtcgcaggaagctctagaaaagtagtggttgagactctttctatc

SEQ ID NO: 2322 - protein, 123 aa, Corynebacterium glutamicum
NNAAFIEIAQEARLAFAEDQFRERGYEIPAVFVRHLEVDYLRAILPDTTQAVVETQVTKIGNTSFSTRQEVKDRNGRVCCVVECVQVAVNVQTAAPRSISKVERKVLTAVATDEVQSQEALEK

SEQ ID NO: 2323 - DNA, 1083 bp, Corynebacterium glutamicum
  CDS (101)..(1060): RXA01595
aatacttcctgtggctggttaaagatggtggcgcttcaatgccggatgaccagcaattgtcggcaatgattgacacggctgtaaaggaaggtccgcaataatgactgcacccacgaacgctggggaactcaggcgagttttgctggttccacacaccgggcgttcttccaatattgaatccgccatcttggcagccaagctgctcgacgatgctggaatcgatgtgagggtgctgatcaatgatgcagatgatccaattgcagagcactccgttttaggccgtttcacccatgtcaggcacgctgcagacgccgctgacggcgcagaactagttctggtgctgggtggagatggcaccttcctccgcgcagcagatatggcccacgctgttgatttgcctgttctgggcatcaacctaggccatgtgggattcttggctgaatgggagtctgactcacttgaagaggcactcaaacgtgtgatcgaccgcgattaccgtattgaagatcgcatgaccttaactgtcgttgtcctagacggcggtggagaagaaatcggccgaggctgggctctcaatgaggtcagtattgaaaacttaaaccgcaggggagtgctcgatgcaaccctcgaggtagatgcacgaccagttgcttcctttggttgcgatggcgtgctgatttccaccccaaccggctccaccgcttatgcattttccgccggtggtcctgtactgtggccagaactcgatgccatcttggtggttcctaataacgcccacgcgctgtttaccaaaccgctggttgtgagcccaaaatccaccgtagctgtggaatccaattcagatacttcagcagcgatggccgtcatggatggtttccgtcccattcctatgcctccaggatcccgtgttgaggtcaccaggggtgagcgtcccgtgcgttgggtgaggcttgattcttcaccgtttaccgaccgacttgtgagcaaattaaggctccccgttaccggttggcggggtccgcaaaaacaggcggaaaataaagatcccaggtcagcggggtaattcgaaaaccattcgaacaa

SEQ ID NO: 2324 - protein, 320 aa, Corynebacterium glutamicum
MTAPTNAGELRRVLLVPHTGRSSNIESAILAAKLLDDAGIDVRVLINDADDPIAEHSVLGRFTHVRHAADAADGAELVLVLGGDGTFLRAADMAHAVDLPVLGINLGHVGFLAEWESDSLEEALKRVIDRDYRIEDRMTLTVVVLDGGGEEIGRGWALNEVSIENLNRRGVLDATLEVDARPVASFGCDGVLISTPTGSTAYAFSAGGPVLWPELDAILVVPNNAHALFTKPLVVSPKSTVAVESNSDTSAAMAVMDGFRPIPMPPGSRVEVTRGERPVRWVRLDSSPFTDRLVSKLRLPVTGWRGPQKQAENKDPRSAG

SEQ ID NO: 2325 - DNA, 792 bp, Corynebacterium glutamicum
  CDS (101)..(769): RXA01600
tgagtacaaatctcgtccaacccatgctcatccactgttttacggcctggtgaagaccgctttggagctgcgtgtccacccttagatctacaatgtgatcatggtttcgaagatgcacattcccggtacccatgagttcacggtgacagatactgaactgttgttagagtccccaattttgggcgttcgtcgagattcattgatcatgccgggtggttccactgcccgccgtgaagtggttgaacactttggggcggtcgcagtggttgcctttgatggtgaaaacattgcgatggtcaagcagtaccgtcgcagcgtgggggattccttgtgggagctgcctgcaggtttgttggatattgctgatgaggatgaactcacgggcgcgcagcgcgagctcatggaggaggctggtttggaggccagtgagtggtccgtgctcactgatttgattacctcgcctggtttctgcgatgaagcggtgcgtgtctttctagcccgaggcctcacaaaggttgagcgcccgaaggttatgggcgatgaagaagcggacatgattaaccagtgggttccgctacatgaggcagtgggaatggtgtttagtggccagttggttaactccattgccattgcgggtgtcatggctgctgatgctgtgattgcgggtcgtgcgtctgcgcgtgccgtcaccgcgccgtttacctatcgccctacggcgttggcgcagcgtcgaaaagcgcacggcattgttcctgacatgaaaaaactatgaaggctcgcgttttagcgaaa

SEQ ID NO: 2326 - protein, 223 aa, Corynebacterium glutamicum
MVSKMHIPGTHEFTVTDTELLLESPILGVRRDSLIMPGGSTARREVVEHFGAVAVVAFDGENIAMVKQYRRSVGDSLWELPAGLLDIADEDELTGAQRELMEEAGLEASEWSVLTDLITSPGFCDEAVRVFLARGLTKVERPKVMGDEEADMINQWVPLHEAVGMVFSGQLVNSIAIAGVMAADAVIAGRASARAVTAPFTYRPTALAQRRKAHGIVPDMKKL

SEQ ID NO: 2327 - DNA, 1653 bp, Corynebacterium glutamicum
  CDS (101)..(1630): RXA01602
tgcaggccacatgcctcccagtgccgtctctgcacgttgattttcccctgccacgactggtcgcagggcgactttctagcacttttaaaggaattttttaatggctaaaacccatattcggttacaggacctttccctgtcatacacctcaaccccgttaattacgaagctcaatatcactgtttcttctggacagtgcgcagtgattgttggtgagaatggtcgaggtaaaaccacacttctgcgagcactggctcgagaattcccgccatctgcaggtgagattctcactcatggcacggtagcaattgctcatcaacacatgcctgcaggtgatctgtccgtcggagagatctgtgatgaggcaattcgtgattcaaagaatgctctcgaagagcttgagagagctggagctctacttgagacaaacactgcgcacgcacttgatggatatcaacaagcccttgatgccgctgaagtgcttgacgcatggaacgctgaacatcgattagaaaaagctctgcgcagctttggcgcgatcaccgatagatcccgtgcactcagtgagctatcgatcgggcaaaggtatcgggtacggctggcctgcctcatcggtggcgatgctgatattttgcttctcgatgaacccaccaatcatcttgaccggggcgcgcttaactatctcaccgaagccataacctcccacaaaggtgtggtacttgttgtttctcatgatcaagcactgatcaaagatgtcgcggatttcatcatcgatattgattcaaccccagacggcctaccacggatctatcatgagggttttgattcttatcgacgccaaaggagtgcgcttcttgaaacttggaggcaggattatgccgctgcacaaactgtgcaacagcaattgcaggaggatctagagcacgcacgccagcgggtgaattcttcgtggaaacctccaaaaggaacgggaaaacacactcgcgcatctcgggctcccggagtggtgcaggccttaaagcgagcacaggatgcgttggatagcaaagcgttggacgttcccccggctccggccccattgcttctgcctaccttgaaagtgcgaccagataaacccatggtggacttttcggacctttttgtaccccaccgcttgcgtctgccaggctcacattcagtggtatcaggtgacaaaatagtgatcactggtgacaacggcgctggcaaatcaacgctcatcgaagtcttgtctggggttttgactccggcaagtggttcggttgcaaaccatgcccgaactggggttctcggccaagaatcacttgtcggcgaggtgccatcaatagcacgagatcacgcagttaagtggggacttttaagtgttgaggagagccgatttgccctacaggaattctcaattggtcaacgcagaagactagatttggccatgtcgttagctggcaatcctgaactgttgcttctcgatgaaccttcgaaccatctgtctatgcacttggtttccgcacttacagagtggctggacacgaccgcggctgcagtgatcatggtaacgcatgatcgacagctactccgcgatacggctcattggaggcacatcgagttgaaatcttaagaattcgcaagggctttcac

SEQ ID NO: 2328 - protein, 510 aa, Corynebacterium glutamicum
MAKTHIRLQDLSLSYTSTPLITKLNITVSSGQCAVIVGENGRGKTTLLRALAREFPPSAGEILTHGTVAIAHQHMPAGDLSVGEICDEAIRDSKNALEELERAGALLETNTAHALDGYQQALDAAEVLDAWNAEHRLEKALRSFGAITDRSRALSELSIGQRYRVRLACLIGGDADILLLDEPTNHLDRGALNYLTEAITSHKGVVLVVSHDQALIKDVADFIIDIDSTPDGLPRIYHEGFDSYRRQRSALLETWRQDYAAAQTVQQQLQEDLEHARQRVNSSWKPPKGTGKHTRASRAPGVVQALKRAQDALDSKALDVPPAPAPLLLPTLKVRPDKPMVDFSDLFVPHRLRLPGSHSVVSGDKIVITGDNGAGKSTLIEVLSGVLTPASGSVANHARTGVLGQESLVGEVPSIARDHAVKWGLLSVEESRFALQEFSIGQRRRLDLAMSLAGNPELLLLDEPSNHLSMHLVSALTEWLDTTAAAVIMVTHDRQLLRDTAHWRHIELKS

SEQ ID NO: 2329 - DNA, 1638 bp, Corynebacterium glutamicum
  CDS (101)..(1615): RXA01605
  modified_base (25): a, t, c, or g
  modified_base (31): a, t, c, or g
agtcaagcgccgaagaaaggcccgngaaggnaatcagacgacgggcacctactacttcggcattgaaattccgaagaacttcagcgattctattgccagcgtgaccagcgattcacccgcgccagcaaccgtcaacgcggtattcaacaacagcaacggcttcattgcctccatgctgggcaaccaggtggtcaacactgttgtggagaccatggacacggaattcggcgtccgcattgtggataacatgctcgtcggtttctccaccttgggcgacggcatgaaccaagccgccgaaggtgccactacgctcagcgatggcgtcggttccgccaacgacggtgcagttcagcttgccgacggcgcggtcaccctgcgcgacggcatcgcaagtgccaatgagggtgcgcaatcgcttgccgacggcgccagccagctcgacaccggcctcggctccgcggctacaggcagccaaacgctcgccgacggtctatccagcctgtctgcgggcaccgcccaactaggccaaggcgcaacccaggtttcagatggcgtgggccaacttgtcgaccaagtagcaccactgaccgcctatgttccagacatcaactctcagttgatcaccctgcgcgacggcgcagccaccattgcctctgaactatctgatccctccagcacctaccgctccggcgtggactccgctgtgagcgcatcccagcaactagcagccggcctgcaaaccctgaaagacggatccagccaactcagcatcggtgcacgcaccctcgctgatggcaccagccaattggccgcaggttccgaacagctagttgttggcgcacaagcactgcgcgacggcaccgtccagcttgatgaaggctccagcgaactcgccctcaaactcaccgacggcgcaagccaagtaccaaccttcgctgacggcgcagacaccaccatcgcaaccccagttgaaacagaacaagcaggagacaccacaccgctcttcggtattggtctcgcaccattcttcatggctgtcggcctgttcatgggagcaaccgttgcctggatgatcctgcacccaatcagtcgccgcgcactcgactcccgcatgggaggcttccgaggcaccctggcaagctaccttccatcaacagtcttaggccttggccaagcaaccatcatgtgggcagtactgtacttcctgctcgacctcaatccagctcacccagctggactgtggatggcgatggtcgccatctcatgggtattcatctccattacccatatgttcaacaacgtggcaggaccctccgcaggccgtgtgctgtccatcgtgatgatgtccttccagctagtctcctccggtggcctatacccaccagaaacccagccagcattcttccactggttccacacctacgacccgatcacctacgcagtcaacctcgtgcgccaaatgatcttcaacgaaaccccatccaacgacccacgcttcatacaagcaatctgggtactgctcttcatctgggcactgatgctcgccatctccaccctggcgaatagaacaaacaaggttcttcgcatgaaggactaccacccagaactgaaggtctaaaagcttttcccgcccggttc

SEQ ID NO: 2330 - protein, 505 aa, Corynebacterium glutamicum
VTSDSPAPATVNAVFNNSNGFIASMLGNQVVNTVVETMDTEFGVRIVDNMLVGFSTLGDGMNQAAEGATTLSDGVGSANDGAVQLADGAVTLRDGIASANEGAQSLADGASQLDTGLGSAATGSQTLADGLSSLSAGTAQLGQGATQVSDGVGQLVDQVAPLTAYVPDINSQLITLRDGAATIASELSDPSSTYRSGVDSAVSASQQLAAGLQTLKDGSSQLSIGARTLADGTSQLAAGSEQLVVGAQALRDGTVQLDEGSSELALKLTDGASQVPTFADGADTTIATPVETEQAGDTTPLFGIGLAPFFMAVGLFMGATVAWMILHPISRRALDSRMGGFRGTLASYLPSTVLGLGQATIMWAVLYFLLDLNPAHPAGLWMAMVAISWVFISITHMFNNVAGPSAGRVLSIVMMSFQLVSSGGLYPPETQPAFFHWFHTYDPITYAVNLVRQMIFNETPSNDPRFIQAIWVLLFIWALMLAISTLANRTNKVLRMKDYHPELKV

SEQ ID NO: 2331 - DNA, 852 bp, Corynebacterium glutamicum
  CDS (101)..(829): RXA01610
cattaatcacatgtggttaatgccttttttgattgcgtagactaggaaggtacgtcaacttccatatctttagtttgcgaaagcgatcaacttaaaacacgtgtccggttttcttactcccccagctacaccccatattcggacggcaactgccagtattgctaccgcagttgccgtagcactgtcagtgttcgctgctgcactcattccaggaagcgctctgtattctgtgctgaccgctggaggggtggcacttggagcagcatcaggcgttgccgcgttacgccatcgcggagggcttcgcatttttcaatggctgtctgcgcttggtggaatcgtcattttgctgatcggtatcgtagtggcagttgcaaagtttggggcctcggcaaaacttgccacgttaggcctggtgacctcgtattatctcatgccgtctgcggcattggcctgttatatcggagggcttggccagctaccagccaaatggattgcgccagcgtttatggctacggctggtgcaggtgctgcgggatggttttcattgggggcaggcaccggttttgaacggttcctcattgctgttgcagcggtgttttcactgatgggatgtgtatacccagtgtggggatgcgtcgtaaagcgtccacgtcaagtggctgcatggctggtcgcgctggcggccctggtgcttggggcgctcatgctttttatggtgagcatggtggtggcgccgggtttgctgtggctgcagcccacgacggtcgcatggggttttatgattgccggggttcttgcgacggtcgcaggcttgtggcctaggcgtttttagacggaatcgtctgggagggt

SEQ ID NO: 2332 - protein, 243 aa, Corynebacterium glutamicum
VSGFLTPPATPHIRTATASIATAVAVALSVFAAALIPGSALYSVLTAGGVALGAASGVAALRHRGGLRIFQWLSALGGIVILLIGIVVAVAKFGASAKLATLGLVTSYYLMPSAALACYIGGLGQLPAKWIAPAFMATAGAGAAGWFSLGAGTGFERFLIAVAAVFSLMGCVYPVWGCVVKRPRQVAAWLVALAALVLGALMLFMVSMVVAPGLLWLQPTTVAWGFMIAGVLATVAGLWPRRF

SEQ ID NO: 2333 - DNA, 480 bp, Corynebacterium glutamicum
  CDS (101)..(457): RXA01611
cccgcttacaactacttggtttacaccggtgttatcaagggctaaatcgcctaacctctatcttcatctatagcttagctttactgaaaggcttttcatcatgcgtaaattccgcaacactgcaattgcactagtttctgcagctgcaatcaccttgggtggcgttaccgctgctaccgctcaggaagacgaaactcctcctgcagcagagaccgagaccacttctccttccggttcctcaggctcttcctggaacgactacaacgaagagtacgaaggcgaccaagagggctacggaatcgacggctttggttcttcccgcgatgactccggagaagaagttccacgttggttggagacctggggcaaggtatttgacgctttgaccattacctccgttcttggtcttgttgtcttccctgttgttaacttcctgaagtacaacggcctcattaagtaatctgcaatttcctgtcaaat

SEQ ID NO: 2334 - protein, 119 aa, Corynebacterium glutamicum
MRKFRNTAIALVSAAAITLGGVTAATAQEDETPPAAETETTSPSGSSGSSWNDYNEEYEGDQEGYGIDGFGSSRDDSGEEVPRWLETWGKVFDALTITSVLGLVVFPVVNFLKYNGLIK

SEQ ID NO: 2335 - DNA, 468 bp, Corynebacterium glutamicum
  CDS (101)..(445): RXA01612
gaaaaaacgacgttggttcgtagtcgctggaaatttaataattcctccgtccccttcaactagggggtggaaacccgactatttccgaaggactattctcatgcgttctttccgtaccgcggcagttgcaggccttactgcagttgcactttccgtaggttccgccaccgtggcaactgcggaagaatctgatcaaaacctctcatccggcttctcagcactttcttccggtggcgcagcggccgtaggtgaggactgggatgcagaccagcccgtcacaggtgaagacatctttggtgaagagcacgagcgcgataacgaaaacaccccagcgtgggctaagaacatgtacgatctaaccgtcttgggtggcattgcttcccttctcggtgtcatcgtattccccgcttacaactacttggtttacaccggtgttatcaagggctaaatcgcctaacctctatcttc

SEQ ID NO: 2336 - protein, 115 aa, Corynebacterium glutamicum
MRSFRTAAVAGLTAVALSVGSATVATAEESDQNLSSGFSALSSGGAAAVGEDWDADQPVTGEDIFGEEHERDNENTPAWAKNMYDLTVLGGIASLLGVIVFPAYNYLVYTGVIKG

SEQ ID NO: 2337 - DNA, 1098 bp, Corynebacterium glutamicum
  CDS (101)..(1075): RXA01619
cctgcaagtttactgctcggccgtcacgggggaatggaaaaagtacgcttggtgttcatatagcgaacccattttctattgcgatgagaggaacaccaccatgcgcgcaatcactcacaacactttcggcgaccccgccgacgtcctacagattaccgagaaggaaattcccactcccggcccaggtcaggttcgtattcaagtgacgctggcaaccatccacaaccatgatttgtggaccgtgaagggctcttacggcttcgtcccagatctgccggccgccgcaggcaccgaggcagtcggcatcgtcgacgccctgggcgagggcgtcgaaggtttgcaggtcggtcagcgtgttgcgtccggcaccagctttggcatctgggcggagtacgcgcttgtcgacgcctccggcctcattcccgtaccagaacagctctccgacgaaagcgcagctcagctcgtcgcaatgcctttcagcgccatcagccttcttgatttcctggatatgaaaccaggggagtggctgatccaaaactccgcaaacggtgccgtcggccgcatgctcgcacagctggcagaatcccgcggcatccatgtcgttggtctcgtccgccgtgacgccggtgtccaagaactcgctgctcaaaacatcagcggcgtcgtttccactgagaccccaggctgggaaaagcaggtcgaagacatcaccggtggcgcaagcatcgccgtcgcacttgattccgtcggtggatcctccgcagctgacctggtgaaactgcttggcgaaggcggcaccctcgtctccttcggcgccatgggcaacccaatcatggaaatcccatccggccccgtcatcttcaagcacatcaccgtcaagggcttctggggaagcaaagtcagccgcgaaatgccagcagagaagaaaacccagttgttcggcgagctcattgcgcgcatacttgatggaacattgacccttccagttgattccacctttgatgccgctgacatcgtctcggccgtgcgcgcctccagcgagcctggccgtgccggaaaagtgctcattcgtttctaaacgtttaaggcccattagac

SEQ ID NO: 2338 - protein, 325 aa, Corynebacterium glutamicum
MRAITHNTFGDPADVLQITEKEIPTPGPGQVRIQVTLATIHNHDLWTVKGSYGFVPDLPAAAGTEAVGIVDALGEGVEGLQVGQRVASGTSFGIWAEYALVDASGLIPVPEQLSDESAAQLVAMPFSAISLLDFLDMKPGEWLIQNSANGAVGRMLAQLAESRGIHVVGLVRRDAGVQELAAQNISGVVSTETPGWEKQVEDITGGASIAVALDSVGGSSAADLVKLLGEGGTLVSFGAMGNPIMEIPSGPVIFKHITVKGFWGSKVSREMPAEKKTQLFGELIARILDGTLTLPVDSTFDAADIVSAVRASSEPGRAGKVLIRF

SEQ ID NO: 2339 - DNA, 726 bp, Corynebacterium glutamicum
  CDS (101)..(703): RXA01622
aaggcgtgggcgtttttgaaggagcttcgtttggagcgcggtcctttggatcgtgaagttgccatcgcagagctgaagagctggtgggaaggagaaaacaatgagtgatttttatgccgacaggttgtttaacgcgatggagcgcaatgaggtagctccaggcatgttgttggtggctgcgcccgatatggcgtcggaggattttgagcgcagcatcgtgttgatcatcgagcattctcctgccaccacttttggtgtgaacatttcttcacgttccgatgttgctgtggccaatgtgttgcccgagtgggtggacctcacctcgaagccacaggcactgtacatcggtgggccgttgagccagcaggctgtggttggtttgggcgtgaccaagccgggcgtggatattgaaaattccaccagcttcaacaagctcgccaaccgcctggtgcacgtggatctgcgttctgcacctgaagatgtggctgatgatcttgagggcatgcgcttttttgcgggctacgcggagtgggctccgggccagctcaacgaggaaattgagcagggtgattggttcgtcacacctgcgttgccgtcggacattatcgcgccgggccgcgtcgatatttggggcgacgtgatgcgtcgacaagcaatgcctttgccgttgtattccacgtttccgtcggacccttcagataattagatgagttccgaaaatttaaa

SEQ ID NO: 2340 - protein, 201 aa, Corynebacterium glutamicum
MSDFYADRLFNAMERNEVAPGMLLVAAPDMASEDFERSIVLIIEHSPATTFGVNISSRSDVAVANVLPEWVDLTSKPQALYIGGPLSQQAVVGLGVTKPGVDIENSTSFNKLANRLVHVDLRSAPEDVADDLEGMRFFAGYAEWAPGQLNEEIEQGDWFVTPALPSDIIAPGRVDIWGDVMRRQAMPLPLYSTFPSDPSDN

SEQ ID NO: 2341 - DNA, 834 bp, Corynebacterium glutamicum
  CDS (101)..(811): RXA01623
cgcgccgggccgcgtcgatatttggggcgacgtgatgcgtcgacaagcaatgcctttgccgttgtattccacgtttccgtcggacccttcagataattagatgagttccgaaaatttaaaagaaattcgcggcggaatcggtgagactttaacggtcggtttggggctgattccgctgggtttggcctttgggctgttgatggtccagacaggtttcgcctggtggtggacgccgattttctccttcgtgatctatgccggttcgatggaatttctggcaatcggcatggtcaccgcaggtatcggcccgttttcggcggcggtcgctggtttcatggtgaatttccgccacattttctacggtctcaccttcccacgccaccgcatcaagtccggcgccggccgcgcctattccacctacgcgcttaccgacgagtcctacgccatcgtgtcagcccgcccacctggcgatatcagtggcacgcgggtgcttaccgttcaaattttgtgccaagctctgtgggttatcccaggaattattggcgccttggttggtcaagtgctgcccgatgatctaaaaggcatggattttgccctgaccgcgctgtttgtggtgctggcgtgggaggcattcaaaaataacaaggattattcgctgccattattcgcggtggtattggctctggtttccggttttgtggcgcccgagcagatgctggttatcgctttgaccacgtactttttgatccttcttctccgcgtccgcttccccaacctggacaagaaactggagatcaggacttcccatgagtgagtttggcctgccagaaggcg

SEQ ID NO: 2342 - protein, 237 aa, Corynebacterium glutamicum
MSSENLKEIRGGIGETLTVGLGLIPLGLAFGLLMVQTGFAWWWTPIFSFVIYAGSMEFLAIGMVTAGIGPFSAAVAGFMVNFRHIFYGLTFPRHRIKSGAGRAYSTYALTDESYAIVSARPPGDISGTRVLTVQILCQALWVIPGIIGALVGQVLPDDLKGMDFALTALFVVLAWEAFKNNKDYSLPLFAVVLALVSGFVAPEQMLVIALTTYFLILLLRVRFPNLDKKLEIRTSHE

SEQ ID NO: 2343 - DNA, 468 bp, Corynebacterium glutamicum
  CDS (101)..(445): RXA01624
gagcagatgctggttatcgctttgaccacgtactttttgatccttcttctccgcgtccgcttccccaacctggacaagaaactggagatcaggacttcccatgagtgagtttggcctgccagaaggcgtcacgctgctcaacgtcgccgccgtgttgatccccatcgcgatcatcaccttgctgctgcgcatcttccccttcgccgcgatgaaacgcgtcaacagcaaccaactcatgggagttttggggcgcacaatgccagtcggagtgatggtcgtattggtcatttacacgctctttggccaggtcagtgcgccaggtggtgtgggtgcttcactgatcgcggtggcattcaccgcgctgctgcactggttgaaaggctccgccgggctgtccatcgtcggtggcaccttggcctacatgtttctggtcaacgtcgttttttaaaagatgcttctcgacgcaaa

SEQ ID NO: 2344 - protein, 115 aa, Corynebacterium glutamicum
MSEFGLPEGVTLLNVAAVLIPIAIITLLLRIFPFAAMKRVNSNQLMGVLGRTMPVGVMVVLVIYTLFGQVSAPGGVGASLIAVAFTALLHWLKGSAGLSIVGGTLAYMFLVNVVF

SEQ ID NO: 2345 - DNA, 1137 bp, Corynebacterium glutamicum
  CDS (101)..(1114): RXA01628
cttcccctttcagcccgttgaagaaccaatgagccctgcccgcacccagccccgagcggctttcctaaggaagctccgacccatcacatgtagcctttccttggttctcgtagggtgcagcaacacggcagagtccacgaccaccgatacggcaggctccactgaaacttcatcacagatttcacccaccactccagtcagcaccaccgaagcagcgccgcctgaagatccaagcgcaaacgctttggaagagtatgctcagatccttgccaatccaagcatctaccccttaaccgaaatttcacaattcgtccccacaggcacatatgcctacacacttgttgaagcaacttccgattccatcccagaactactactccgcgccgatagtcacgaattcgcgccaattttggttttcacctatgacgaaaacacacaatccgcaacccaagctggaggagtcctaattgacggtgtcgccagcgccggcggttcacgagtcaaggtcagagcttcaaattcaggagcaggaatctaccaattgaattggtactcgatacaaccagttggcgaaagctctttgtacggaatccaaggaaactccctgacacaaatcgcagaccccgaggatttcatggtccgtgaactattacctgaccaccacgaaattacctgggttgattccaacgacccctccggcctatcaaccgttcagactggtggagccaacattcaacaagcagccccaactcccgttcaacagcctgcgtcaaacctgcactacttctctggtgtagtaacgatgcagaccgccggcgaactcatgcgaggtgaacgaactcccaatggtgagcctgccactgatctctatctcgtactggtccttgattccccaattgaaatcacagcacgaaacgcagctacagaccctcagactcgtaccatttccgaagtcagcctcggccgatacatccccgctgatggtgacaatgattggataggctacctcgacacccacgtggaaatcactgcaacaacggatcaggtctggttcccaaccgacaccggtctacctcttggaatgcttcgtctagcggactacaaaagcatctcataaaccgacgcagcactcgtcga

SEQ ID NO: 2346 - protein, 338 aa, Corynebacterium glutamicum
LVLVGCSNTAESTTTDTAGSTETSSQISPTTPVSTTEAAPPEDPSANALEEYAQILANPSIYPLTEISQFVPTGTYAYTLVEATSDSIPELLLRADSHEFAPILVFTYDENTQSATQAGGVLIDGVASAGGSRVKVRASNSGAGIYQLNWYSIQPVGESSLYGIQGNSLTQIADPEDFMVRELLPDHHEITWVDSNDPSGLSTVQTGGANIQQAAPTPVQQPASNLHYFSGVVTMQTAGELMRGERTPNGEPATDLYLVLVLDSPIEITARNAATDPQTRTISEVSLGRYIPADGDNDWIGYLDTHVEITATTDQVWFPTDTGLPLGMLRLADYKSIS

SEQ ID NO: 2347 - DNA, 1200 bp, Corynebacterium glutamicum
  CDS (101)..(1177): RXA01630
gtaggtgagtcttcgtgagatacccccggccagtcatacagttcaaccaagctccaccacccagataaaaacctgcgggttgcgttttaggagaattcccatgagtgatcaaaaaattgttgttggcctgctaggcatcacccacccgcatgcgtcggcgcgggtgcgtgccctccgtgaaattgatggggtagaggtcgtcgccgccgcggatactgattcccgcctccagtacttcaccgacaaatatgatgttgaaccccgcgagatcgatgacgtcttgaacgacgatcgcatcaacgccatcatggttcactccaagagcaaggacatggtccctcacgccaagcgcgcgctcgcggccggaaaatccgtcgtcgtggagaagcccggcgggggaacagtggcggatcttgaggagctcctggccctcaaagaagctgccgatcctcagcgaatcgtgcaggtcgggtacaacgtccgcctgtctgaatcggttcagagattaaaagagcttctcgacgccggcctcatcggcgaagtcgtcagcgtgcaagcacgcggcgccgcaaaagtaggtgagcatatcaccgagcacctcaaccaacccgcagacatgggcggtgtgttgtggattcttggctgccacatgctcgatgcattggtggaagtcttcggagctccagaatccgtgaacgcccgagtgcataagaccgcaaaactctctgacgacaccagccgcgaagactcagcctccgcactgctgtactacccagatttctccgtcagcttcagcttcgacggccacgatgatctggaatggttcgaaagctcccgactcacggtctatggaaccaagggcatgatcgaagccggaatcctccctcagacactgcgcgtatacctcaatgagtcacgccagggctggccacagggttggaccgagtggacccagagctacttcaccccaccgtttgctcgcacagaatccaacaaattctcagagcttccagagctagaaaacatcagcaacttccgcacagaaatgcaggggtgggtgaattccattcgcactggatcccgcaatgtggcgccagttgaggatgctctcacagtcgctcgcattgtcagtgcatgctacgaatccgacaacaaccagggcatttccgtaaacatctaagaggagcactccatgaaacc

SEQ ID NO: 2348 - protein, 359 aa, Corynebacterium glutamicum
MSDQKIVVGLLGITHPHASARVRALREIDGVEVVAAADTDSRLQYFTDKYDVEPREIDDVLNDDRINAIMVHSKSKDMVPHAKRALAAGKSVVVEKPGGGTVADLEELLALKEAADPQRIVQVGYNVRLSESVQRLKELLDAGLIGEVVSVQARGAAKVGEHITEHLNQPADMGGVLWILGCHMLDALVEVFGAPESVNARVHKTAKLSDDTSREDSASALLYYPDFSVSFSFDGHDDLEWFESSRLTVYGTKGMIEAGILPQTLRVYLNESRQGWPQGWTEWTQSYFTPPFARTESNKFSELPELENISNFRTEMQGWVNSIRTGSRNVAPVEDALTVARIVSACYESDNNQGISVNI

SEQ ID NO: 2349 - DNA, 1494 bp, Corynebacterium glutamicum
  CDS (101)..(1471): RXA01641
gtgaaattaggggaattctcaccaacgctgctccccgtccccttttgctggcatactcaaagacacatttgttgggggacaattttgggggttggttattttggcaatcgataatgcgctgcgcgtgagcatccgcatagatctcaccgttggcgatgcgcccgctgctgtggctgatgtggcgctacctgcaggttcgagtctggcggacattttggatgaaattttagaactcaccgatgcaccccggatttccaggccgtgggtggctcacactgctgcgggaagtcccattgattgcgggattccgcttgcagaaacacaagtggaacaaggcagcgtggtggtcctttcacccgaaagggacttggaagcccccgtgttgcgtgatgtcgccgaagcgttggtggagttttcttccacgaaccgcgccgggcacctcgtggaattgatgactttcgcggggctcatcggggctgccgtgttaatgacaagtcctgctgcctccggaattattgtgcccggccgcatgggaatcttcgtcgcaatctgcgctctactgcttctgtggctcccacccgcgcacaccccgatccttcgaaacgtcctgccgattaccctgatcttgggcgcaggcggagcggtatcagtgctggttgcaggcacttctgggacttctcccggcgcgcttacctggacgattttcgctggcgcgtgcactattcttgccagttcgctgctggttcatgtggtgtatcgtccagcaattcttctggtggcaacactgtccacattggggctcggtctcttagtccttgcagcaaccaccactctgtggaagctcaaagctaccgaagatttcagcggtccagcagcgatcacggtcaccgcttccaccatcaccatgtgcttcgccccgaaaatcgcagcatcgctagcaggcctgcgcgtcccatcgcttcccaccgccggcgaagatctctccgtcagcgacctcaccatgactgatcccgagaaaagaataaaaacaacaaagacgcttttcgacgcccagatccttggccttggcgttttgagcgggcctttggcgttgttgtcggttaccccgggcacctggacaaccaccgtttttagtttatgcatcgcggtggcttcgctgcttcacgctaatcgtcatcaagcaccaattcccacgtggacattgatggggttatctgcccttggtttcatttccatggcgttatccgcaagccgatcaggttcactaattgcactgatcggttctgtggttatcatcgctgtgctggtcagcgtggcattgtggatcagtacagtccccacgctggaacccaccaccattgtgtggcttgaaaggttggaatcactgtgtcttgcagctagtctgccactcgcactgcatttgctggatgtatttggaatgctgcgcggtcttgatattggattcggtggataagatgcgcagactcatcgcgg

SEQ ID NO: 2350 - protein, 457 aa, Corynebacterium glutamicum
LAIDNALRVSIRIDLTVGDAPAAVADVALPAGSSLADILDEILELTDAPRISRPWVAHTAAGSPIDCGIPLAETQVEQGSVVVLSPERDLEAPVLRDVAEALVEFSSTNRAGHLVELMTFAGLIGAAVLMTSPAASGIIVPGRMGIFVAICALLLLWLPPAHTPILRNVLPITLILGAGGAVSVLVAGTSGTSPGALTWTIFAGACTILASSLLVHVVYRPAILLVATLSTLGLGLLVLAATTTLWKLKATEDFSGPAAITVTASTITMCFAPKIAASLAGLRVPSLPTAGEDLSVSDLTMTDPEKRIKTTKTLFDAQILGLGVLSGPLALLSVTPGTWTTTVFSLCIAVASLLHANRHQAPIPTWTLMGLSALGFISMALSASRSGSLIALIGSVVIIAVLVSVALWISTVPTLEPTTIVWLERLESLCLAASLPLALHLLDVFGMLRGLDIGFGG

SEQ ID NO: 2351 - DNA, 1365 bp, Corynebacterium glutamicum
  CDS (101)..(1342): RXA01642
ttggaatcactgtgtcttgcagctagtctgccactcgcactgcatttgctggatgtatttggaatgctgcgcggtcttgatattggattcggtggataagatgcgcagactcatcgcggttagcttggccgctctgtttatgttggcttccactccagcgacgagggcacaggaagtagaagctctcgcttgccccgaggtagcgatcgccgatccttcctccgcagttttagatgaacacctttcgcagtcattatcccaagctcaccaactagcaactggcgccggtgtgatggtggcagtcatcgacaccggagtatccctgcatccacgtctgccccacttaattcccggcggtgatttcgtgggcgcccaccaaagccccgatgtgccaggtgaacttatcgattgcgacggccacggcaccatcgtcgccggaatcatcgcctcccaaggaaaccccggcaccggctggccatatgacggcagctccgatccttatatcggtgtcgccccagattccggaatcatctccattaaacaaaccagctcatatgtgcgtactcgtgaagattccaacgtcggaacgctgagcaccctggcggaatccatccaccgagctctcgattccggtgcccacgtgatcaatatttccgtggtgtcctgtttgccccaatcacccgacgaggccgcatcgttccagcctctgacggatgctcttaacagagcagaacttcaaggggtgatagtggtggcagcagcaggaaacctcgggcaggattgtccagttggatctaccgtttatcctgcacattcagacactgtgctctctgtgtcggcacgttttgattctcacacgcttgcagaatattccatgcctggcaaccaacaaatcctctctgcaccaagccacattcaggctggtctatcaccgcgtggcgacggcttcgccagccacatgatcaccaccgctggcgaaagccccttcgagggcaccagttttgccgctccagttgtcagcgccacagctgcactgcttcgccagcattttccctttgccacaccctatgaaattcgtgcacgaatcttcaacagcatcgaccctgcaagaggcgctattgatccctacctggcacttactcaagaaatctatcccaccactcccctggttcatgagatcgcactaagtgttcccacgccgccggatgattctccacgggagcggggcatcctagttaccgcaatcattgttgggttgctcgcagtgttagctgtgctgatgggactacgccgaattcatcatcactcggcctttcaaaaagctagctcaagtgttatcacttaatctatgaggcaccgttcaga

SEQ ID NO: 2352 - protein, 414 aa, Corynebacterium glutamicum
MRRLIAVSLAALFMLASTPATRAQEVEALACPEVAIADPSSAVLDEHLSQSLSQAHQLATGAGVMVAVIDTGVSLHPRLPHLIPGGDFVGAHQSPDVPGELIDCDGHGTIVAGIIASQGNPGTGWPYDGSSDPYIGVAPDSGIISIKQTSSYVRTREDSNVGTLSTLAESIHRALDSGAHVINISVVSCLPQSPDEAASFQPLTDALNRAELQGVIVVAAAGNLGQDCPVGSTVYPAHSDTVLSVSARFDSHTLAEYSMPGNQQILSAPSHIQAGLSPRGDGFASHMITTAGESPFEGTSFAAPVVSATAALLRQHFPFATPYEIRARIFNSIDPARGAIDPYLALTQEIYPTTPLVHEIALSVPTPPDDSPRERGILVTAIIVGLLAVLAVLMGLRRIHHHSAFQKASSSVIT

SEQ ID NO: 2353 - DNA, 549 bp, Corynebacterium glutamicum
  CDS (101)..(526): RXA01643
cggatttcaacactttcaggatgcatctgtaactatgcccatgccacaccccatgtttatcgatgtctccttcccacccgcggagacctgtagttaacccatgggcacgatgcgagaaatggtcagtgaccgcattgaccgactacaagaagcacacgcgcgatcaaagcagaagaagttcggcttcttagttcggccaggcaccctgatccttggatggttggtcacgatcatcggtctgatcaccattccacttcccggccaaggctggctgaccaccttcattggtgtgggcattttgtctctggagcttaaatgggcgaagaacctcctggcctggggagtgcatcagtatgatcgcttcttcacctggtacggcaagaaatcattccgcttccgcatggcgatgttggcactgatgattctgctgatttgggtggtgttcatcgtgacattttggttgatgtggcacgccggaactatcccgtgggcagatgagttcttcacctggcttgggttgagccgctagcaactattcgctttgaaggc

SEQ ID NO: 2354 - protein, 142 aa, Corynebacterium glutamicum
MGTMREMVSDRIDRLQEAHARSKQKKFGFLVRPGTLILGWLVTIIGLITIPLPGQGWLTTFIGVGILSLELKWAKNLLAWGVHQYDRFFTWYGKKSFRFRMAMLALMILLIWVVFIVTFWLMWHAGTIPWADEFFTWLGLSR

SEQ ID NO: 2355 - DNA, 729 bp, Corynebacterium glutamicum
  CDS (101)..(706): RXA01645
agagggcatcacctatgaccgcctgacaatccgcgattacatctggcgctgggacaccgactggttctggtgttcacgcgcattcggcacccaaaaccccgtggtgcgcaaactctggcccagggatctgctgcgctcgagtttctattggaagatcatcggctgggatcgaaaatactccatcgctgatcgcctggaagagcgcaaaggccgcccggctagggaacgggtggtccaagacgtggaagttacgattgataaactgccagaatttttgaaatggttctttgaaagcagcgacatcgagccgctgtggctgtgcccgatcaagcttcgggaggtaccaggtagttcggttggtgctggagaaattttgagctccgctgaagcaatcgactccggtgctgctgaacacccttggccgctgtatcccttgaagaaggacgtgctgtgggtcaacatcggattctggtcctcagtgccggttgatctgatgggctccgatgcaccagagggagcatttaacagagaaatcgaacgcgtcatggcagagctaggcggacataaatcgctgtactccgaagcgttctacaccagggaagactttgaaaaactttatggcggaaccatcccggcgctgctaaaaaagcagtgggatccccacagccgattccccggtttgtatgaaaagacagtaaaaggcgcctaggatcgctcactgtaggtaga

SEQ ID NO: 2356 - protein, 202 aa, Corynebacterium glutamicum
VVRKLWPRDLLRSSFYWKIIGWDRKYSIADRLEERKGRPARERVVQDVEVTIDKLPEFLKWFFESSDIEPLWLCPIKLREVPGSSVGAGEILSSAEAIDSGAAEHPWPLYPLKKDVLWVNIGFWSSVPVDLMGSDAPEGAFNREIERVMAELGGHKSLYSEAFYTREDFEKLYGGTIPALLKKQWDPHSRFPGLYEKTVKGA

SEQ ID NO: 2357 - DNA, 942 bp, Corynebacterium glutamicum
  CDS (101)..(919): RXA01646
ggtcgtgccgtggagcgtgctgcgattgttgccgcagggaagtgaattagcaaaagagacagcgctcgcgcccacctattaaggagtatggtggccttacatgagcggattagttgacccggatagtacttttttaaagaccatcggaaaactgagcaacagcttgtccattggtcgtggagtagatcaaaaagaggtaatccccaaaggctggaacgcccattgggaggcaattacaaagcttaagagaagctttgacgcgattcctgctggggagcgggtgcgtttagctaagaaaacctccaacctgttccgtggacgctccgatgcaggtcacggcctagatgtggcagcgcttgggggagtgattgccattgatccggtcaatgccaccgccgatgtacagggcatgtgcacgtatgaagacctggtagatgccactttaagttatggtctgatgccgttggttgtgcctcaactgaaaaccatcacgcttggtggcgcagtgaccggaatgggcgtggaatccacatccttccgcaacggtttgccacacgaatcagtgctggagatggatatttttaccggcactggtgagatcgtgacttgctcgcccacagaaaatgtcgacctttacagaggttttcccaactcttatggttcgctgggatacgcggtgcggctaaaaattgagctggaaccagtgcaagattacgtccagctgcgccacgtgcgcttcaacgatttagagtctttgaccaaagcgattgaggaagtcgcgtcttctctggagtttgataaccaacccgtcgattaccttgacggcgtggtgttttcacccacggaagcctacttagttcttggcacgcaaacctcacaacctggccccaccagcgattacaccagggatttaagctactaacgctccctgcaacacccaga

SEQ ID NO: 2358 - protein, 273 aa, Corynebacterium glutamicum
MSGLVDPDSTFLKTIGKLSNSLSIGRGVDQKEVIPKGWNAHWEAITKLKRSFDAIPAGERVRLAKKTSNLFRGRSDAGHGLDVAALGGVIAIDPVNATADVQGMCTYEDLVDATLSYGLMPLVVPQLKTITLGGAVTGMGVESTSFRNGLPHESVLEMDIFTGTGEIVTCSPTENVDLYRGFPNSYGSLGYAVRLKIELEPVQDYVQLRHVRFNDLESLTKAIEEVASSLEFDNQPVDYLDGVVFSPTEAYLVLGTQTSQPGPTSDYTRDLSY

SEQ ID NO: 2359 - DNA, 1020 bp, Corynebacterium glutamicum
  CDS (101)..(997): RXA01656
tcggcaagcatggcttcatcgtcctcaaaaaagtggtctaatgcaagtgactgaaagtggatctaccgctagtccactttgtggcgttggatcatctgtcatgaccgaaactcaagaaacttaccaagcaaccactcgtgtgaagcgcggccttgccgacatgctcaagggtggtgtgatcatggatgtggtcacccctgaacaagcgcgcatcgccgaagatgcaggtgccagcgcagttatggcactcgagcgcgttcccgccgatatccgttctcagggcggcgttgctcgcatgagtgatcctgacctgatcgaaggaatcgtcaatgcggtctccatcccggtcatggcgaaagctcgcatcggtcacttcgtggaagctcaggttctggaagctctcggtgttgatttcatcgacgagtccgaagttctcagccctgccgactacacgcaccacatcaacaagtggaagttcgacgttcctttcgtctgtggcgcgaccaacctcggcgaagctttgcgacgcatcaccgaaggcgctgcaatgatccgttccaagggcgaagccggcaccggcgatgtctctgaagctgtccgtcacctgcgcaccatccgcggcgacatcaatcgcctgcgctccctggatgaggatgaactcttcgtcgccgccaaggaattccaggcaccatacgacctggtccgcgaagtcgcctccaccggcaagctccctgtggtcaccttcgttgcaggtggcgtcgcaaccccagccgacgctgcactcgtgcgccaaatgggcgccgaaggcgtctttgtcggctccggcatcttcaaatccggcaatccagccgcccgcgccgcagcgatcgtcaaggctgcaacgcttttcgacgacccctccgtcattgccgacgtatcccgcggcctgggtgaagccatggtgggcatcaacgtatccgacgttccagcaccacaccgactcgccgagcgcggctggtgatcgttggagttttagctctc

SEQ ID NO: 2360 - protein, 299 aa, Corynebacterium glutamicum
MTETQETYQATTRVKRGLADMLKGGVIMDVVTPEQARIAEDAGASAVMALERVPADIRSQGGVARMSDPDLIEGIVNAVSIPVMAKARIGHFVEAQVLEALGVDFIDESEVLSPADYTHHINKWKFDVPFVCGATNLGEALRRITEGAAMIRSKGEAGTGDVSEAVRHLRTIRGDINRLRSLDEDELFVAAKEFQAPYDLVREVASTGKLPVVTFVAGGVATPADAALVRQMGAEGVFVGSGIFKSGNPAARAAAIVKAATLFDDPSVIADVSRGLGEAMVGINVSDVPAPHRLAERGW

SEQ ID NO: 2361 - DNA, 843 bp, Corynebacterium glutamicum
  CDS (101)..(820): RXA01665
aggattggcgcccgtgacgctactgaaaaggtggaggggcgcgtcgaaaagcgttggccggtgcttgagcgaaaacccgtgatgattagcatggtttgttgtgaagatcgatgaattgattgctctcgccgcggagcaacccactcgcatctccaggcgttccggtgtctcgcgctcgaccctgaagcgggtcggcgatggcaccagcgagcccaccctgtcgacgctgcgtgaggtcgcgttggcgctcgggcttgatattaaggtcgccgcgcaccacgcctgcgatccctttgcggccgctgcagcgcgcacgcttatcgacgcctccgtccccgaaaatccccacaaccaggaaattctcgcttggttgcaccgttttgagcggtggaatatcaacgatccgctcacccttgtctctgaagccggaacgcttcagggcatcacacatcgccaggatgcgcagtttgtgaaactcaatccacgcggcatcgctgagctaccggagcttttccaacagcacaaaaccaaatgggcgctgtcgggcgctgcggctgccacggtgatcatgggacaaattgtgctggggaattcgattgtgtggcacgaacctgcccacgatctcgatgtctcagcgctgggcaccattgttgatgtggcagaagacgccgatctaattctcctgcccgcaacggtcacggaactggtgggaagttacacccaggacaggctaaattttgtggcacctgtgcaattagttattgatctacacagcctccacatgttcgaggaagccgattacctcacgagcggttggcgctaaaatacttagcgtacgcaccc

SEQ ID NO: 2362 - protein, 240 aa, Corynebacterium glutamicum
VKIDELIALAAEQPTRISRRSGVSRSTLKRVGDGTSEPTLSTLREVALALGLDIKVAAHHACDPFAAAAARTLIDASVPENPHNQEILAWLHRFERWNINDPLTLVSEAGTLQGITHRQDAQFVKLNPRGIAELPELFQQHKTKWALSGAAAATVIMGQIVLGNSIVWHEPAHDLDVSALGTIVDVAEDADLILLPATVTELVGSYTQDRLNFVAPVQLVIDLHSLHMFEEADYLTSGWR

SEQ ID NO: 2363 - DNA, 738 bp, Corynebacterium glutamicum
  CDS (101)..(715): RXA01671
tctaaaaacacatttttaagccctcccggcgcagctgaaaactcagtcgccgggagggcttttttgtacccgaatttgtacccgaatttaaggaatcgctatgaatcatgttgttaattttgcttcacatttggaagacgcagccctgaagcaagccgaagctactgccaccatgccgtttatttacccgcatgtggcgttgatgcctgatgctcactttgggctgggttcgtcggtgggaacggtgttcggcaccaagggtgcgatcattccggcggctgtgggtgtggatataggttgcggaatgataggagtgtgtaccaattacacggcctctgacctggagggacgtgatttggtgacgcttcgggattacatcgagcgggtgattccgttgtctcctggaaattacaattccaccaccttgaaggaaaccgcgaaggtgaaggtcgcggagttggaggaactcgcggagcgcgatggtgtagatttgtcgcactctccgacgtggaagcgccagttgggttcgcttggtggaggtaatcacttcattgagttgtgtcttgatgagttggatcgggtgtggatgtttttgcactctggttcccgcggtgtgggtaacaagattgcccataagcacatcaagaacgcgcaggcccagtgtaagaatgaggagcttcccgataaggatcttgcgtaccttgaccgaggggactgaggagtttgagtcttacatca

SEQ ID NO: 2364 - protein, 205 aa, Corynebacterium glutamicum
MNHVVNFASHLEDAALKQAEATATMPFIYPHVALMPDAHFGLGSSVGTVFGTKGAIIPAAVGVDIGCGMIGVCTNYTASDLEGRDLVTLRDYIERVIPLSPGNYNSTTLKETAKVKVAELEELAERDGVDLSHSPTWKRQLGSLGGGNHFIELCLDELDRVWMFLHSGSRGVGNKIAHKHIKNAQAQCKNEELPDKDLAYLDRGD

SEQ ID NO: 2365 - DNA, 1158 bp, Corynebacterium glutamicum
  CDS (101)..(1135): RXA01673
agtttgcaggttcggccacccattatccatatcaacattatatgggtggatatgaaagtaccgtctaccgcgttcttttcaattagcgcaaccttgaagcatgtctacaaaccttctggaatcgacgccgccctttacccaacttcgcaccggagtcctccagaagtacaccccgggcctgctcttatgctccattgcggtactcatcgctatgatcgtgaatcactttttctctggtgtgagtccgcttatcgtcgcgatcattcttggcatcatcctgaccaacctgattcagctcccagcatcgacctcacccggcatcacgttggcgtcgaaaaagcttttgcggctgggaatcgtcttccttggtctgcagttagttttctcagatattttgtcacttggtttccccatgctggcggtgattgtgtgcatcgttgccggtggtatttttgggaccatcctcatgggacacctgctcagaatgaaaccaacccaagttctgttgattgcttgtggcttttctatttgtggcgctgcggccgtggcaggtgttgaaggagtaactgattccgaagaagaagaggtcgttactgcggttgcacttgttgttattttcggaacgctgatgattccttttatcccattcgcaaccaaagtcttggggttatcccctgaaatcggtgggatgtgggcaggcggatccatccatgaaatcgcccaagtagtagcagctggaggagtcattggtggtggagcattaggtgttgcagttgtggtgaaactcgcccgagtactcctacttgcacccattgctgccattttaagttttcgccagcgccgccagggttacacgtcccccgatggaaagagaccaccggtcgttcccctatttatccttggattcttggcgatggtagttttgcgctccactgttgcgctcccagacgaggtaattgcggctggaggtttcctacagacagccttgctctctgcagcaatgtttggtctcgggtgtggcgtaaaaatccagaacctgatccatgttggggtcaagcctttcattctggctttcggatccacgacacttgtcaccagtatcgcacttgcaggcaccctactcacccacctcggatagaaccgaagacccagttgtac

SEQ ID NO: 2366 - protein, 345 aa, Corynebacterium glutamicum
MSTNLLESTPPFTQLRTGVLQKYTPGLLLCSIAVLIAMIVNHFFSGVSPLIVAIILGIILTNLIQLPASTSPGITLASKKLLRLGIVFLGLQLVFSDILSLGFPMLAVIVCIVAGGIFGTILMGHLLRMKPTQVLLIACGFSICGAAAVAGVEGVTDSEEEEVVTAVALVVIFGTLMIPFIPFATKVLGLSPEIGGMWAGGSIHEIAQVVAAGGVIGGGALGVAVVVKLARVLLLAPIAAILSFRQRRQGYTSPDGKRPPVVPLFILGFLAMVVLRSTVALPDEVIAAGGFLQTALLSAAMFGLGCGVKIQNLIHVGVKPFILAFGSTTLVTSIALAGTLLTHLG

SEQ ID NO: 2367 - DNA, 534 bp, Corynebacterium glutamicum
  CDS (101)..(511): RXA01675
ttgccgattctagcgggagaattagtgtccatcgcatcgaaccacatctgattttgagccctggctaacggattgtttttgacagattggaatgacaataatgaacgagattccagaatggttgactcttgtatctgttgaagcaggaaagagacttgggcggcctgggccattggtgtttccgccggagttggtcactttggcagttgaagggattgagcttattgaacttgagccttcatggacttctgatttgcctctgccggaattcgggttcctagctgcggatatggttgatttctatgatgattatgagtttagtgaatggattccgggtgcgtggcctcttgctttagatggtggaggaggtttcttttgccttgatctccgtgctgccaacgctgatggagagattcctgttgtgtgggtgcatgccagcaacttgggttggggtgatgatgaggcagtacgcgtagctgcctcgttggcagatttgttgagtccgtcgaaatagaagaattagcatttaccgga

SEQ ID NO: 2368 - protein, 137 aa, Corynebacterium glutamicum
MNEIPEWLTLVSVEAGKRLGRPGPLVFPPELVTLAVEGIELIELEPSWTSDLPLPEFGFLAADMVDFYDDYEFSEWIPGAWPLALDGGGGFFCLDLRAANADGEIPVVWVHASNLGWGDDEAVRVAASLADLLSPSK

SEQ ID NO: 2369 - DNA, 879 bp, Corynebacterium glutamicum
  CDS (101)..(856): RXA01676
agttacagcttttctcggtggcacactcgcgctacttagcccttgtgccgcactccttttaccagcattttttgcatcctcagtgggtgctggcccgcgcatgatccttcacggtgttgtgttctacgcaggacttctagtacttctcgtgccacttggccttggtgcgggaatcctcggcgagctgtttatcacccaacgccagaccatcatcgtggtttcatcgatcgtgctgattatcctaggttttgtccagatcttcggcggcggattcgacttcggaaaagcactcccaggattagatcgtctgcaatctaaggccactgtgacctcaggtctaggaaagagctttttactaggaatgaccagtagtattgccggtttttgttccggaccaatcctcggcgccgttcttactttggctgccaccagtggaaactccatcacctcagcactcattttgagtgcttatggtgcgggaatggtgctgcccctgatggctattgcagcgctctgggccaaactcggacagcgtggacagcagatgctccgcggccgggaattcaccttcttgggcaggcagtggcacattgtttctgtcattagcggtgccctgatcatcgctgtcggaatcctcttttggtccacgaacggccttgtcagcatgccggagctcgttccaatggacacccagatctggctacaggaagccacattctcactcgggtcaccactctttgacatcgcattgatcattgtcgccgctggcttgttcttgtacttctggaacaaacgacaaaagcgaaaagaagaagctcagcgacccaaagaaagtggatgggttattaaccctcgctaattattagttttggagcgagg

SEQ ID NO: 2370 - protein, 252 aa, Corynebacterium glutamicum
MILHGVVFYAGLLVLLVPLGLGAGILGELFITQRQTIIVVSSIVLIILGFVQIFGGGFDFGKALPGLDRLQSKATVTSGLGKSFLLGMTSSIAGFCSGPILGAVLTLAATSGNSITSALILSAYGAGMVLPLMAIAALWAKLGQRGQQMLRGREFTFLGRQWHIVSVISGALIIAVGILFWSTNGLVSMPELVPMDTQIWLQEATFSLGSPLFDIALIIVAAGLFLYFWNKRQKRKEEAQRPKESGWVINPR

SEQ ID NO: 2371 - DNA, 867 bp, Corynebacterium glutamicum
  CDS (101)..(844): RXA01677
gtcgccatagttgagttttattcatggcttttagctaggcgactttagttgagggcttttagttgagggcttcccagcagggatggttaaggagaattcagtgaaccaacagagtaaaaagtggctcgtaccgacactggtcgtcatcattgcagtgctcctcatcgcagttgttctgttgatgtaccgaggaaatgcgagtgatacggccgagggcgtttcagccgctgcgacttcggactcggctgctgcttcgactgctgcttcgggttccgcttctggtgctgcggactccgatctgaccagcgtggaagcacgcgacccttccgaccctgttgcggtgggagacgttgatgcacctgttgggttagtggtgttttccgactaccaatgcccgttctgtgcaaagtggagcgatgaaaccctgccacagatgatgaagcatgtggaagatggaaacctccgcattgaatggcgtgaagtgaacatctttggagaaccatctgagcgtggagctcgcgcggcatacgctgcgggtttgcaggacgcatacttggaataccacaacgcactctttgccaacggtgaaaaacccagcgaagacctgctcagcgaagagggacttattaagcttgctggtgaccttggactagacgaatcgaaattcactgccgatttccaatcccctgaaactgcagtcgcaattgcgcaacatcaacagctgggaatcgatcttggcgcctactccaccccagctttcctcctaggtggccagccaatcatgggcgctcagcctgcttctgtatttgaagccgccttcgagcaagcactggcagcgaaagaataaaccgtggatgtcggcctagt

SEQ ID NO: 2372 - protein, 248 aa, Corynebacterium glutamicum
VNQQSKKWLVPTLVVIIAVLLIAVVLLMYRGNASDTAEGVSAAATSDSAAASTAASGSASGAADSDLTSVEARDPSDPVAVGDVDAPVGLVVFSDYQCPFCAKWSDETLPQMMKHVEDGNLRIEWREVNIFGEPSERGARAAYAAGLQDAYLEYHNALFANGEKPSEDLLSEEGLIKLAGDLGLDESKFTADFQSPETAVAIAQHQQLGIDLGAYSTPAFLLGGQPIMGAQPASVFEAAFEQALAAKE

SEQ ID NO: 2373 - DNA, 756 bp, Corynebacterium glutamicum
  CDS (101)..(733): RXA01681
ctttaacgaaagacttgtcgttactttagtaattagaccaacatggtggtgagtggttgaaatcttgccatcaaaattatcgagtgagttgaagcattccgtggaagtactactacttatcgcaatcgtcgttggtggtggcgtttttgtcgcctcaaagatgggatccaataacaataagaagcaagaagaagccaagtttgctgacgcacaggcagatgcgcgtcggtggattgagcgtcttggttcccaggttttgaccatcgcaggtacagatgctgcgtcgacccaggctattgctgacgcctcagagcgctataccgctgcgtcttctcagatttcttctgccactactcctcgtcaggcagagttggctcgagaatctgcactagagggtctgcattatatgaacgcggctcgtgagatcatgggtatgactgctggccctgagctgcctcctctggaaggtcagcgcaatgctggtcgcgttacagaaaagcgcaccattgagcaggagggtcgccagatcactgcttcccccgtcgcaacagatgaaactccgaactactaccctggcggtaacgttgcgggtcgcccagtccctgctggttggtactccgagccttggtgggcaagcgcattgcgttccggtctgtggactgcaggttcggtcatgatgttctcagcaatgtttaacggcatggctggtgtcggctactccgctgcagacctttgaaaaatggctatggcgagggc

SEQ ID NO: 2374 - protein, 211 aa, Corynebacterium glutamicum
VEVLLLIAIVVGGGVFVASKMGSNNNKKQEEAKFADAQADARRWIERLGSQVLTIAGTDAASTQAIADASERYTAASSQISSATTPRQAELARESALEGLHYMNAAREIMGMTAGPELPPLEGQRNAGRVTEKRTIEQEGRQITASPVATDETPNYYPGGNVAGRPVPAGWYSEPWWASALRSGLWTAGSVMMFSAMFNGMAGVGYSAADL

SEQ ID NO: 2375 - DNA, 702 bp, Corynebacterium glutamicum
  CDS (101)..(679): RXA01685
caataattaggtgagcaaccctaataagaaacctttagatcccgcacaaagattctccctccccaccagatgggcgatgttctttgtcgggatctttattatgtccttcgccatcggcatcaccgtccacgcaggactaggaaccaccacaatttcatcacttcccgtggtgtggactgctgccagcggattatccctgggctggaccacaatttacttcaatggcttcatgattctgtgccaaataattgtgctgcgttcccagttcaaaccacaaatgttagtccaaatcctgtgggcattcctctttgggtttctttgtgatttaagcctgcaactaaccacctgggcgcaaactgacaattattttgtggcctggatctgggttattgtgtccaccattttgatgtcgatcggagtttttattcaagtactccccaacatcactttcatcgctggtgaaggcattgtctctgcgctggtgaagaaatttcccaacgtggaatttggcaccatgaaacaaatcgtcgactggactttcgtctccgtcgctgccattttgtcctggatcaccatgggtggacttattggcgtgcgcgaaggaacagtgttcgcggcgtttttcatcggattcttcgtccgccagtggcgcaaactctacctccgctccatcggtcactaaagagcttgttccaggaagag

SEQ ID NO: 2376 - protein, 193 aa, Corynebacterium glutamicum
MSFAIGITVHAGLGTTTISSLPVVWTAASGLSLGWTTIYFNGFMILCQIIVLRSQFKPQMLVQILWAFLFGFLCDLSLQLTTWAQTDNYFVAWIWVIVSTILMSIGVFIQVLPNITFIAGEGIVSALVKKFPNVEFGTMKQIVDWTFVSVAAILSWITMGGLIGVREGTVFAAFFIGFFVRQWRKLYLRSIGH

SEQ ID NO: 2377 - DNA, 564 bp, Corynebacterium glutamicum
  CDS (101)..(541): RXA01686
ggaggaagggttgcaacgctttttcaagagaatgaccgtgcgtccgcttaaacgaagcgtcgaacgccggtcttttctcatttcacttaagatgtagaacatgacttcactcagggacttacttgtttccaccaatgccgacgcagcaattgcagatatgtcagcatttatcgaagaaaccgtgggcaagcaatccggcatcagcggcatcgcactcaaaggcgcaatgggtgctgcaaccaagatcgactccgacatcgtagccaaaggctccaggcgcctcctcccggaaatcgctgactccctcgacggactctggcaggaataccaaaatggtggcaccgccgcagatttcggcgcccacctcgaggccaacagctccaccgcactcgacgcgattctcagcgttgctgacaaaaacgcagagagcatcaacgttccaggacttggcaaggtctacaagggcgtgcgcggcaaggctgccaaagtaatcgagcaggaacttcctgcaattggccagttgatcgaaaagaacgcacaataattaggtgagcaaccctaata

SEQ ID NO: 2378 - protein, 147 aa, Corynebacterium glutamicum
MTSLRDLLVSTNADAAIADMSAFIEETVGKQSGISGIALKGAMGAATKIDSDIVAKGSRRLLPEIADSLDGLWQEYQNGGTAADFGAHLEANSSTALDAILSVADKNAESINVPGLGKVYKGVRGKAAKVIEQELPAIGQLIEKNAQ

SEQ ID NO: 2379 - DNA, 1545 bp, Corynebacterium glutamicum
  CDS (101)..(1522): RXA01693
aggagactggctggattattggctggttttcttgggaaatcgtcatgggcattaatcctagtcccaacaattgccagaacccgaacactaggcttgaaccatgaatactgcacctttcaaactcgaagctgacttcgcatcagccctgcccaccatggcagccccctggcaaggtgaggaagcccccaaccctgagctcgtgattttaaatgacgacctcgcctacagcctcgggcttgatccgacatggcttcgcacacctgagggcgttcaatttcttctcggactcaaccccgagcccttaacaaaagcagttgcgcaggcctattccggccaccaattcggacagtttgtggcaagccttggtgatggccgagcgcttcttctcggcgaagcccgctcagctgacggcgtactgcatgatatccacctcaaaggatctggacgaacccaattctcccgaggagccgatggacgcgccgtccttggccccgtcttacgcgaatacatcatctccgaagcgatgcatgcacttggtgttcccaccaccaggtcacttgcagtaattagcaccggtaggaaaatccaacgaggaagcgtagccccaggcgcagtccttgttcgagtagcaaccagcctcattcgagtcggatccttccaatactccaacatctctggtggcatcgaactatctcaacacctggcgaactatacgatcaccaggcatttcccttcgttggtagctgaactatccgcaccaacccccgcaacttatgtatcactgtttaaagcgattcttcagcgccaagcagacaccgttggaaaatggaccaggctgggtttcgttcacggagccctcaacacagacaacacgttgatatccggagaaactgttgactacggcccatgcgctttcatggagcgctaccgtggcgacgcgaaatttagctccatcgacacttatggtcgctacaaatttgaaaaccaacctatgatcctcggatggaacatggcccgcctcgtagaaaccctcctcccactcctgggcgccacaccagacgaaggcatgacagcagcccaagaagctctcgtagaattcgatgacctctgcgaacaagcaatccgaaaagaattcgccactgcactgggccttgacgagtcagacaccggcacggtagagcagttccgtgaactgctctacctccataaccccgacatcaccacgctgctgcgcgcactcaccgacaacaccgcaccaccgagtggctttgaagcattcgttcacgactggaaaacccaagacccagatatcgaagcaatgcgagcagtaaatccacttttcattccacgcaatcacctcgtggaagctgctctcgcagacgcagttgaagggaatctagaaaagttccacgaactcctcgctgctgtcaccaatccttttgatccaactgcgggccccgatgaactacgcctgccaagcgaagaaggatttgaagaagactacatgaccttctgcggtacctaggacagatggtggggcagacg

SEQ ID NO: 2380 - protein, 474 aa, Corynebacterium glutamicum
MNTAPFKLEADFASALPTMAAPWQGEEAPNPELVILNDDLAYSLGLDPTWLRTPEGVQFLLGLNPEPLTKAVAQAYSGHQFGQFVASLGDGRALLLGEARSADGVLHDIHLKGSGRTQFSRGADGRAVLGPVLREYIISEAMHALGVPTTRSLAVISTGRKIQRGSVAPGAVLVRVATSLIRVGSFQYSNISGGIELSQHLANYTITRHFPSLVAELSAPTPATYVSLFKAILQRQADTVGKWTRLGFVHGALNTDNTLISGETVDYGPCAFMERYRGDAKFSSIDTYGRYKFENQPMILGWNMARLVETLLPLLGATPDEGMTAAQEALVEFDDLCEQAIRKEFATALGLDESDTGTVEQFRELLYLHNPDITTLLRALTDNTAPPSGFEAFVHDWKTQDPDIEAMRAVNPLFIPRNHLVEAALADAVEGNLEKFHELLAAVTNPFDPTAGPDELRLPSEEGFEEDYMTFCGT

SEQ ID NO: 2381 - DNA, 738 bp, Corynebacterium glutamicum
  CDS (101)..(715): RXA01714
cattggataattagcaggagtgaagttgcatcaaaggacaaacataaaataaacggcgcgcctccccagagttaccccaataattagtaaattgcagattgtgatcgattccgaagcgacctctcagcacaagacctcagctaccccggcagagagcactcccgcggagttttccgaagcggttgagtctatgcacagagcgcgcctgcgcccagaacttactttgggcacgattaggccgcctcagcgcctggcgccgttttcgcacgccattggactcgaagtcggaaatcaagaagagtcagacgatgtctccaccaacagcgaaggtgattcctttggtcgtttgattctgctccacgatccgggtgccgaagaaacctgggaaggagcaatgcgccttgtcgcctatattcaagctgacatggatcacgctgttgcttccgacccgctattgccggaagtagcgtggcaatggcttaacgaaggtttggaacaagccggcgcaggatttaccaacctaggcggaaccgtaacctccacaacctcggtgcgctttggtgaaatcggtggaccgccaagtgcctaccaagtggaaatgcgtgcgtcctggaccgcgactggcaccgacctcaccgcgcatgttgaagcgttcgcagcagtgcttgcctctgttgctggacttcccccagagggcgtcaccgaactacgaaggtagattggacaccatggtttccg

SEQ ID NO: 2382 - protein, 205 aa, Corynebacterium glutamicum
VIDSEATSQHKTSATPAESTPAEFSEAVESMHRARLRPELTLGTIRPPQRLAPFSHAIGLEVGNQEESDDVSTNSEGDSFGRLILLHDPGAEETWEGAMRLVAYIQADMDHAVASDPLLPEVAWQWLNEGLEQAGAGFTNLGGTVTSTTSVRFGEIGGPPSAYQVEMRASWTATGTDLTAHVEAFAAVLASVAGLPPEGVTELRR

SEQ ID NO: 2383 - DNA, 819 bp, Corynebacterium glutamicum
  CDS (101)..(796): RXA01715
acatgttgttggaacatgccggcagagccgacactacgattcattcgctaaagggtctggccactgacactggcaaagatccacgaaaggaagttaccctgtgagcgagctcgatattaaacagctcaacaaactgcagcgctactctcagtgggcggtgttccgtgctattcctggagcgctcgatgatgatcgcacagaagtcactgaccaagcagccaagttctttgccgaccttgaagcagaaggcaaagtcactgtccgtggcatttacaacgcctccggcctgcgcgcagacgctgactacatgatctggtggcacgcagaagaattcgaagacattcagaaggccttcgctgatttccgccgcaccaccattttgggtcaggtttctgaggtcttctggatcggaaacgctctccaccgtccatctgagttcaacaaggctcacttgccttcattcatcatgggtgaagaagcaaaggactggatcactgtttacccgttcgtgcgcagctacgactggtacatcatggagcccttgaagcgttcccgcattctccgcgagcacggacaagctgctgtggaattcccagatgttcgtgccaacactgtgccggctttcgcactgggtgactacgaatgggtgctggctttcgaggctgatgagttgcaccgcattgtcgatttgatgcacaagatgcgttacaccgaggctcgcctccacgtccgtgaggagctgccatttatttctggacagcgcgtcgacattgcagatctgattaaggttcttccttaaaagctgcttttctaaacgat

SEQ ID NO: 2384 - protein, 232 aa, Corynebacterium glutamicum
VSELDIKQLNKLQRYSQWAVFRAIPGALDDDRTEVTDQAAKFFADLEAEGKVTVRGIYNASGLRADADYMIWWHAEEFEDIQKAFADFRRTTILGQVSEVFWIGNALHRPSEFNKAHLPSFIMGEEAKDWITVYPFVRSYDWYIMEPLKRSRILREHGQAAVEFPDVRANTVPAFALGDYEWVLAFEADELHRIVDLMHKMRYTEARLHVREELPFISGQRVDIADLIKVLP

SEQ ID NO: 2385 - DNA, 642 bp, Corynebacterium glutamicum
  CDS (101)..(619): RXA01729
tcaaggtccggcgattcttcaattcttcgagttcaggaaatcgcatactctctaggctagtaaacttttctacgaacctattactaagaaggagcccgaagtgaagttgaggacaatcccagccctgttagccgtcgcacttcttgcaggctgttcgggtgaaagtgctgatagccaagccgtttccgctgaggaaaccatggaagtaaccactacctcaaccccggtgttcgaagccaaagaggtaagcccaatcacagtcccaagcggcgatatcagggttgaagacccaggtctcaatgttgaatttatcttccgaggcacccgctacggcaccaacggtggctcaattattcacatcgcggtgaaaaacctaaacgacgtagccctgccagccgacgccatcgatccacccaccctggacatcgaagactacaacggcaacaaaaccaacatcgaaaccctctccggcgacgacaacatcccactcgacctaccactgggtgccggcgcgacaacgaacctgcaatacgcgttcaacacctcaaacggctcattgtcgaatgctaaattccagatcggaaacgtcatctactcaggcaatttgaacagcttggcgtaagttcaaaaaataatttgaat

SEQ ID NO: 2386 - protein, 173 aa, Corynebacterium glutamicum
VKLRTIPALLAVALLAGCSGESADSQAVSAEETMEVTTTSTPVFEAKEVSPITVPSGDIRVEDPGLNVEFIFRGTRYGTNGGSIIHIAVKNLNDVALPADAIDPPTLDIEDYNGNKTNIETLSGDDNIPLDLPLGAGATTNLQYAFNTSNGSLSNAKFQIGNVIYSGNLNSLA

SEQ ID NO: 2387 - DNA, 822 bp, Corynebacterium glutamicum
  CDS (101)..(799): RXA01731
gcttttgcagctgtggggttgggctgggggcaagtgttcatgtaggtgtcattgatcgttcactcaaggttggacgttgtgttcatgaataacttttatgatgaacgcatcgtccatttcttcccgattcaaggatctttttgtgacacccagtattgtttttgatttcgatggcacgcttgccattggccatggccctgtccttgcgtatgcattgtgtgttgcaccggagggttccaaggactttctggagcgtgtgcgcagggagcttcggcgctatgacgatggtcagagtatttaccgtgatgggtatgacattgtggctaagttggcgtcggaattggggattgatgatggcacgatgtctgtcgcttatggcgagagccggaagttgcttggttcggatttagcgcctgttgagcatgtgcggggtattaaggatattttgtcctcgttgaaaggtcatgctcggttggttttagctaccaatgccccggaaaatggcgtgcatgatttgctgcgtcagtggggtgttgctgatttgtttgatcagttgcattttgtggtgggtaagcctgcagggttgatttcgatcatttctgatttgcagcttgatggtccggtgcttgcggtgggcgatatttatgaattcgatctgagtcctgcagcgcagttaggtgcagatacggctctggttggagctacagcaaccatttctgaagcgaaggtctccatgcgtggagattctatcgctgatctccctctccttgcctgggtttgttcccgggtctcctcttcttaactttcttgtctcatgtcgct

SEQ ID NO: 2388 - protein, 233 aa, Corynebacterium glutamicum
MNASSISSRFKDLFVTPSIVFDFDGTLAIGHGPVLAYALCVAPEGSKDFLERVRRELRRYDDGQSIYRDGYDIVAKLASELGIDDGTMSVAYGESRKLLGSDLAPVEHVRGIKDILSSLKGHARLVLATNAPENGVHDLLRQWGVADLFDQLHFVVGKPAGLISIISDLQLDGPVLAVGDIYEFDLSPAAQLGADTALVGATATISEAKVSMRGDSIADLPLLAWVCSRVSSS

SEQ ID NO: 2389 - DNA, 837 bp, Corynebacterium glutamicum
  CDS (101)..(814): RXA01738
gtgagctctaccgcatcgactccccagaagcagaaactgtagagcccggcgatcgtctcctttacgttcgccgagtatttagcgaggaggtaaatgacaaatgagaattcttcccatcggcccccacgatgaaatcgccgtcaacggatcaatagtccttctatccgagcacgacggagacatcgtatcggtcggccccgacctcggcacggtgcgagttacccttgaagagatcgaaagtttaggtacaccgacggcaccccgcgatctgggttctcgggaagtcgacgcatgcgtatcgttgctccgcaaccgcgagttagtgcgattcgatccccacgatggcagtgaattaacctatcgggaacatagcgttgcttacggtgcgagtggcaagccattgtttccccgattggatccagcggtgatcggcattgtggagctgcgaggtgaggatcgtttgcttctgggcatgaatgcgcagaaacgccaacgctattcattaatcgcaggttatgtttcgcatggtgagtcgctggaagacgcattcaccagagaagtgttcgaggaagcggcgcgccgggtatctgagatttcctatgtgtcgtctcaaccatggccgatctctggttcgctgatgctgggtatgaagggcttcacggaagatgagttgcctcaaggcgaaactgatggtgaattagcggagacaatctgggcttcgccactagacattatcgatcgtaagattccgatcgccccacccggatcgattgcctacgacatgatcaacgcctgggcgcgagataaacaaaactaagggagctttttacagtgatc

SEQ ID NO: 2390 - protein, 238 aa, Corynebacterium glutamicum
MRILPIGPHDEIAVNGSIVLLSEHDGDIVSVGPDLGTVRVTLEEIESLGTPTAPRDLGSREVDACVSLLRNRELVRFDPHDGSELTYREHSVAYGASGKPLFPRLDPAVIGIVELRGEDRLLLGMNAQKRQRYSLIAGYVSHGESLEDAFTREVFEEAARRVSEISYVSSQPWPISGSLMLGMKGFTEDELPQGETDGELAETIWASPLDIIDRKIPIAPPGSIAYDMINAWARDKQN

SEQ ID NO: 2391 - DNA, 921 bp, Corynebacterium glutamicum
  CDS (101)..(898): RXA01741
gcatctctggcttttcctgcatgacagatgattgtaactgtgatgaaataaggccagatgaagtaactgtgtcgattaagttttgggggaaatttttcagatgacacacatcgctttagccaactctgcccaagttctgatccgcccggattctgcgattcaattcggcatcgacgccacccgcgctggcgtcttaaatatcgatccatcgctgtcgtcgcgagtcgtcccggtgctgcggaatctgcggaccgcccgaccgatcgttgatgtcatcgccgacctcacgactgcaggcctcgcacccaccgctgcgagcagtttgctcgaggaccttttagaattcggtgtggtccgcgaatcggcggcggcgcaggtgttgctgttcggggacggttcgcttgtcgacgtcacctccttccttttggaaacctccggctttgttcccagaccccagatcatcgatgagtcgcctcgagagtttttcgagcttccctccagccacattttggttctcaacaagctcgcacattcccaacgtctatccccgctgcttcacaaatatgcgccgacgtatctgtgcgccgcgatcgtcgataatcgtggcatcatcggcccgggccggagatcacgatcggggccgtgtttgatgtgtgtggatctgcatcgctgcgatatcgatccgcattggctctctattatcaatcagcaacccaacggtcccacctttcctgatcccgtcacggagatggcgacggctgcccgactcgtcgcctgggtcactgccgatacatggttgcccggcgttgtggaggaagtaaacccccacgatcgaacaaactcggtacgcaccctccctgtgcatccaaaatgtccgatgtgttggagtttaggttcctaaagtgctcccaaaatcgcgag

SEQ ID NO: 2392 - protein, 266 aa, Corynebacterium glutamicum
MTHIALANSAQVLIRPDSAIQFGIDATRAGVLNIDPSLSSRVVPVLRNLRTARPIVDVIADLTTAGLAPTAASSLLEDLLEFGVVRESAAAQVLLFGDGSLVDVTSFLLETSGFVPRPQIIDESPREFFELPSSHILVLNKLAHSQRLSPLLHKYAPTYLCAAIVDNRGIIGPGRRSRSGPCLMCVDLHRCDIDPHWLSIINQQPNGPTFPDPVTEMATAARLVAWVTADTWLPGVVEEVNPHDRTNSVRTLPVHPKCPMCWSLGS

SEQ ID NO: 2393 - DNA, 903 bp, Corynebacterium glutamicum
  CDS (101)..(880): RXA01748
atcaccaaatgtggcggttttgcgtcgaaaagcgtgctctttctacacctctttgaggttcattttcgcggtttcctcacaatcgcctattgttaagtacatggcagacgcgaaaaagcaggcggataaagccgccaagaagcaggtaagagcagccaagaaggcacagcgcaaggagactcgctcacaaatgtggcaggtcttcaacatgcaacgcaagcaggataaggctcttattccgcttctgttgctcgctattcttggtatcccgctggtccttttcctcatcggtttgatttggggtggtcagtggtggatgcttccgatcggcattgctgcaggtgttgtagctgcaatgtttattttcacccgtcgcgttgagcgtgacgtgtacaagcgcgccgaaggtcagcagggtgctgctggttgggctgtggagaacctccgctctggcgtgggcatgacctggcgcaccaagaccgctgttgcagtgaccactcagatggatgcagtgcaccgcgtcattggtctgtgtggtgttgtgctggtcggcgagggctcccctcaccgcctgaagccaatgcttgcgcagcaaaagaagcgcctgaaccgcgtggcacctggtgttccagtgtatgaaatcatcacgggcaacggcgaaggccagacccctatcgcgaagctgcagcgtgaactggtcaagctgcctcgcaactacaagaagaacgacgtcgctgccctggccgctcgcattgaggctatggacaatgtcggaaacgctcctggcggatctttgcctaagggtccattgccaaagggcgcaagcatgtccggtatgaaccgccgcgctcgccgacaggctgaacgcaagggcgaggcttaaagccttttcgctttcgcgtc

SEQ ID NO: 2394 - protein, 260 aa, Corynebacterium glutamicum
MADAKKQADKAAKKQVRAAKKAQRKETRSQMWQVFNMQRKQDKALIPLLLLAILGIPLVLFLIGLIWGGQWWMLPIGIAAGVVAAMFIFTRRVERDVYKRAEGQQGAAGWAVENLRSGVGMTWRTKTAVAVTTQMDAVHRVIGLCGVVLVGEGSPHRLKPMLAQQKKRLNRVAPGVPVYEIITGNGEGQTPIAKLQRELVKLPRNYKKNDVAALAARIEAMDNVGNAPGGSLPKGPLPKGASMSGMNRRARRQAERKGEA

SEQ ID NO: 2395 - DNA, 1740 bp, Corynebacterium glutamicum
  CDS (101)..(1717): RXA01749
ggtttttgcgtgctctggtttagggactggttttgggaacgtgcccagttccacatcaaataacgctgaggtcgtacttaatccatgagatcatgaatgggtgagcttccttgtagaaaatcaattactcgcgttggttgtcatcatgacggtcggactattgctcggccgcatcaaaattttcgggttccgtctcggcgtcgccgctgtactgtttgtaggtctagcgctatccaccattgagccggatatttccgtcccatccctcatttacgtggttggactgtcgctttttgtctacacgatcggtctggaagccggccctggattcttcacctccatgaaaaccactggtctgcgcaacaacgcactgaccttgggcgccatcatcgccaccacggcactcgcatgggcactcatcacagttttgaacatcgatgccgcctccggcgccggcatgctcaccggcgcgctcaccaacaccccagccatggccgcagttgttgacgcacttccttcgcttatcgacgacaccggccagcttcacctcatcgccgagctgcccgtcgtcgcatattccttggcataccccctcggtgtgctcatcgttattctctccatcgccatcttcagctctgtgttcaaagtcgaccacaacaaagaagccgaagaagcgggcgttgcggtccaggaactcaaaggccgtcgcatccgcgtcaccgtcgctgatcttccagccctggagaacatcccagagctgctcaacctccacgtcattgtgtcccgagtggaacgagacggtgagcaattcatcccgctttatggcgaacacgcacgcatcggcgatgtcttaacagtggtgggtgccgatgaagaactcaaccgcgcggaaaaagccatcggtgaactcattgacggcgacccctacagcaatgtggaacttgattaccgacgcatcttcgtctcaaacacagcagtcgtgggcactcccctatccaagctccagccactgtttaaagacatgctgatcacccgcatcaggcgcggcgacacagatttggtggcctcctccgacatgactttgcagctcggtgaccgtgtccgcgttgtcgcaccagcagaaaaactccgcgaagcaacccaattgctcggcgattcctacaagaaactctccgatttcaacctgctcccactcgctgccggcctcatgatcggtgtgcttgtcggcatggtggagttcccactaccaggtggaagctccctgaaactgggtaacgcaggtggaccgctagttgttgcgctgctgctcggcatgatcaatcgcacaggcaagttcgtctggcaaatcccctacggagcaaaccttgcccttcgccaactgggcatcacactatttttggctgccatcggtacctcagcgggcgcaggatttcgatcagcgatcagcgacccccaatcactcaccatcatcggcttcggtgcgctgctcactttgttcatctccatcacggtgctgttcgttggccacaaactgatgaaaatccccttcggtgaaaccgctggcatcctcgccggtacgcaaacccaccctgctgtgctgagttatgtgtcagatgcctcccgcaacgagctccctgccatgggttatacctctgtgtatccgctggcgatgatcgcaaagatcctggccgcccaaacgttgttgttcctacttatctagcattgaccccttaagcgcag

SEQ ID NO: 2396 - protein, 539 aa, Corynebacterium glutamicum
VSFLVENQLLALVVIMTVGLLLGRIKIFGFRLGVAAVLFVGLALSTIEPDISVPSLIYVVGLSLFVYTIGLEAGPGFFTSMKTTGLRNNALTLGAIIATTALAWALITVLNIDAASGAGMLTGALTNTPAMAAVVDALPSLIDDTGQLHLIAELPVVAYSLAYPLGVLIVILSIAIFSSVFKVDHNKEAEEAGVAVQELKGRRIRVTVADLPALENIPELLNLHVIVSRVERDGEQFIPLYGEHARIGDVLTVVGADEELNRAEKAIGELIDGDPYSNVELDYRRIFVSNTAVVGTPLSKLQPLFKDMLITRIRRGDTDLVASSDMTLQLGDRVRVVAPAEKLREATQLLGDSYKKLSDFNLLPLAAGLMIGVLVGMVEFPLPGGSSLKLGNAGGPLVVALLLGMINRTGKFVWQIPYGANLALRQLGITLFLAAIGTSAGAGFRSAISDPQSLTIIGFGALLTLFISITVLFVGHKLMKIPFGETAGILAGTQTHPAVLSYVSDASRNELPAMGYTSVYPLAMIAKILAAQTLLFLLI

SEQ ID NO: 2397 - DNA, 1764 bp, Corynebacterium glutamicum
  CDS (101)..(1741): RXA01750
tcgcccccgaggattgtgttgcgaacagtcctgaagatcatgtcagacctacattgagccaatgatcgacatgtggacgagggaaactcgaccgaacaatatgtgtatcaacgaccctaaaggcgagttgctgaagaaaaattatgttcggatgtctaagcgcggttttcaggttgttcagtttaacctgattaacaacctgaaaactgatatttataacccgttgggattagcagccgaagcagctcgcgaaggtaacgggatgaagtgcgcaacctatgtggaaaatatcgcagaggtgttctttccggtggacggtgccgatgatccggtatggccgaatgcggccaacaatgccttcaagcgtgcagcctatggtcttatcgacttctatttggaagaggagcgcgagatgcgcaagcaggctgcagctgagaattgggatgccaaggtgcttgatacacgtattgatcagatgtggggtaaggtcacgctctacaactgctaccagctctttgtgcagctttcggcaaagaagctgaagaatcccgttgagcgactcaatgaacgtgcacgtgccggtgaattcggtaacttagagactgatgaaaatgcagccatgatgttccaggatgctgtgacagaggccgaagagaacgaaatgtttctgtgggagggtgagaaagaaaaagacatgctcaccttgttctttagtgccacagacggtctgccaaagtccagtgttcgtactctggtgggcaacgcagataaggccctgaaagcaatgggtggcgctgaaaaaatgatggcgtcggtctacggtatcgcgattacagcgatgtccttctttacagaccccacaatttcaacgttaacctcaggcacactaagtcagaacgttgacttggccggattgtcgtttccacggcgcatgggtgttcgttttgcggccccctatgtgaagcgctacaacctggttggatcacaggtgaaatgggatgcgtatagtgacgccaagttcaccaagccgttgggtaagaattttgttcatgatgacacgctgtcggttgagggttgggcgcggttctatattaaagactcgttcccgagtaatactgcgtacctgcgtttgcggattctcaatggtacttctggcacgttgatcaagactctgtacttcaagttcaccaagggctaccaaacgaaccttaaaggccgtgcgtttattactgatccggtgaccgatgagaagatcattaagaatggtctgctgatcgagctggtgaaaaacgatgctggtgactttgttccaggtcatgtgcagtttaagacgaagaaactgaatcttgaccaactcacgcaggaacagatcaatatgccgggtcatgacatgatcaagcaggttgatgcgatggttgatgcggtgtcggctctgaatgtgcggtattcggagaagcctaaggcagtgttcttcgtaacgcctccgcatcttatgaaatatgcgaagttgattttgattctcatcaaacagcttgtggatctgaacttcgattcctcgtatatgacgcgtgagaatcagaagccggattataagactcgtttcatgttggacgagttgggaaaccttcagagtgagggtcatggtattgcgggatttgaaaccatgctctcgatcggtctgggacaagaacaacaatttagtgcgaccagttgcgtagcgaaaaactacgctcttgcagcttaaagttgcaagaaactgtttca

SEQ ID NO: 2398 - protein, 547 aa, Corynebacterium glutamicum
MCINDPKGELLKKNYVRMSKRGFQVVQFNLINNLKTDIYNPLGLAAEAAREGNGMKCATYVENIAEVFFPVDGADDPVWPNAANNAFKRAAYGLIDFYLEEEREMRKQAAAENWDAKVLDTRIDQMWGKVTLYNCYQLFVQLSAKKLKNPVERLNERARAGEFGNLETDENAAMMFQDAVTEAEENEMFLWEGEKEKDMLTLFFSATDGLPKSSVRTLVGNADKALKAMGGAEKMMASVYGIAITAMSFFTDPTISTLTSGTLSQNVDLAGLSFPRRMGVRFAAPYVKRYNLVGSQVKWDAYSDAKFTKPLGKNFVHDDTLSVEGWARFYIKDSFPSNTAYLRLRILNGTSGTLIKTLYFKFTKGYQTNLKGRAFITDPVTDEKIIKNGLLIELVKNDAGDFVPGHVQFKTKKLNLDQLTQEQINMPGHDMIKQVDAMVDAVSALNVRYSEKPKAVFFVTPPHLMKYAKLILILIKQLVDLNFDSSYMTRENQKPDYKTRFMLDELGNLQSEGHGIAGFETMLSIGLGQEQQFSATSCVAKNYALAA

SEQ ID NO: 2399 - DNA, 652 bp, Corynebacterium glutamicum
  CDS (101)..(652): RXA01752
gaaatgacgtgaccatcgataccaatacccaattgaaagatcttgacctggtcagccaagttggccgtcagatcgtggcagaacaacaggtggggaggtcatgatggaacaagatctcagctaccgtgaaattcttcccctcaacgcgagtgaggagaagaaaaaggctgcactgattgatgccattgaagggttaagggtgcgcgatccgctactctctgcctcgattgcatttactagagggcagaaagtcgccttcattgctgtggtggtgggctttatcttgatgctcatttttgctcggcaagcagcacttattggactgtcagcaacgtgtacgttcatgtacctcattacattgttggacagatttatcatgttttccagaggtatccgcgcggaatccatcatccaggtatcggatgaagatgcgctggctttccctgaggacaagctgaaaacctacacggtgttggtgcccgcctatggcgaacctgaggtgattgcgcagctgctggcatccatgcacgcttttgattaccccaagcatcttctgcaggtattgctcatgttggaggaagatgatctgcccacgatcgccgcggcagaggcagcgggagtggatcaggtggcaacgatcattaaggtgccg

SEQ ID NO: 2400 - protein, 184 aa, Corynebacterium glutamicum
MMEQDLSYREILPLNASEEKKKAALIDAIEGLRVRDPLLSASIAFTRGQKVAFIAVVVGFILMLIFARQAALIGLSATCTFMYLITLLDRFIMFSRGIRAESIIQVSDEDALAFPEDKLKTYTVLVPAYGEPEVIAQLLASMHAFDYPKHLLQVLLMLEEDDLPTIAAAEAAGVDQVATIIKVP

SEQ ID NO: 2401 - DNA, 1662 bp, Corynebacterium glutamicum
  CDS (101)..(1639): RXA01753
ctgattgtcgcagccgtggtgtcagtgtccaggcgttcgcaaaaaggatacaaatgatttcttctttacccagtagaacgcaggggaggaggttgggtccatgagtaacccgtcgctagaacctctagaaccgatcgagctttctgacggtactgaaattgaagtttcagacgttgatccagaaccgcaagctggcaatgcgcagatggaagtacccagcttacggacatatgtttttcgcggaatcattgccattgcctgtttgatcattggtttttatgagagctttgtgctgatgtggcaaaacctccgaatcggcgtggccaactactcactacttgtggtgctcatggcgatcgtgttgtttatcggactggaccgcaagcgtgctcgtgcattgaacattcacgaccgcgaagtcgactacatcattggtggcattgtcgtactgatagccatcacgattaagagccagcttctgccacgttttgtggactgggaaactctgctgcgcttggatatgttcgcactgttattctttgcgtttggtatttccggcctggtgtttggcatgcgctctaccttttcttttgcacccggctggattttgctgtttggctacaacgcggtggcacacctgatcatctcggtgattttcggtggtggcttttggggcccggtgatggcaaacatcattggactgtctcttgcggtgttggtgtcctccaacagggacctggttcaggccacctatttggcactgatgacggtgttgtttggcgtcattattgccatcatcgtgtgggcgctgaccgatggcagtaagttcctcaccttggtcccagcagtgctggcaaccatcactgtggtgttggtgtcttcgcgttggaggcttggtcagtggaaaattcgtcgtagacaacccacggtggaaaaagccggacccgcgcttatcgcggtcgtggttgcgacagcactcttggcgtggattcctactccttatgtggagcgcgtcaacaacctccccgggcttcaaatgctggcaaagcctgccccaggtgttatcgcacctattggttggcacatcgacgatgtgcagtattacaactgggcttcgcgctacttcggccccggttcctctctgcttaggcagacgatgacggcagatcattacaacgaggcgtgggatccagatggactcgaccgaactgttgtggtggataccctccaatcggcggaacggttccagcagcgtgcctttggtgacgagacgctgtattccactctgagaggtcgaaagtcagataccgtccaggtggatctgggatacggcgtggacggacgcgcctacacggtgctcgatgaaactgacttcttgacgtacaccaagctggtttttgaatggcagaccaccaacaacaccgtggagaagatctccgtcatcgcggtggatgatcaccgcgcagaagcgaagttcccggagcttgcaccatcggttaccagaatgtttatccaggtggctaccattttgttccgtggaaatgacgtgaccatcgataccaatacccaattgaaagatcttgacctggtcagccaagttggccgtcagatcgtggcagaacaacaggtggggaggtcatgatggaacaagatctcagctac

SEQ ID NO: 2402 - protein, 513 aa, Corynebacterium glutamicum
MSNPSLEPLEPIELSDGTEIEVSDVDPEPQAGNAQMEVPSLRTYVFRGIIAIACLIIGFYESFVLMWQNLRIGVANYSLLVVLMAIVLFIGLDRKRARALNIHDREVDYIIGGIVVLIAITIKSQLLPRFVDWETLLRLDMFALLFFAFGISGLVFGMRSTFSFAPGWILLFGYNAVAHLIISVIFGGGFWGPVMANIIGLSLAVLVSSNRDLVQATYLALMTVLFGVIIAIIVWALTDGSKFLTLVPAVLATITVVLVSSRWRLGQWKIRRRQPTVEKAGPALIAVVVATALLAWIPTPYVERVNNLPGLQMLAKPAPGVIAPIGWHIDDVQYYNWASRYFGPGSSLLRQTMTADHYNEAWDPDGLDRTVVVDTLQSAERFQQRAFGDETLYSTLRGRKSDTVQVDLGYGVDGRAYTVLDETDFLTYTKLVFEWQTTNNTVEKISVIAVDDHRAEAKFPELAPSVTRMFIQVATILFRGNDVTIDTNTQLKDLDLVSQVGRQIVAEQQVGRS

SEQ ID NO: 2403 - DNA, 405 bp, Corynebacterium glutamicum
  CDS (101)..(382): RXA01760
acctactcaaactttcctctgcgccataacgtgaagtgagtgccggggcagtcccggcagcacccaaaagcgcatttttgatacgaaagtgagtcatacgatggcagcatttctagagatcaccttgaaaatcaatgacgaaggccgcccatcagcagctggcgtctaccaggaatacaagcaaccattcctcagctcaattgctggcgctacaagcaaagaactcctcatccgagaagaagacgtgcaggtgctccacggctgtgacaccgtagctaatgctgaagattatcttgtcagcgaactgttcacggccgatgttgtcggtggtctagctccactattgcaggctgatccagagattcgtatttaccaggtcgcgtaactgctgtggcaggctcatcg

SEQ ID NO: 2404 - protein, 94 aa, Corynebacterium glutamicum
MAAFLEITLKINDEGRPSAAGVYQEYKQPFLSSIAGATSKELLIREEDVQVLHGCDTVANAEDYLVSELFTADVVGGLAPLLQADPEIRIYQVA

SEQ ID NO: 2405 - DNA, 501 bp, Corynebacterium glutamicum
  CDS (101)..(478): RXA01768
gacaacgaacacaacacccagatcctgcactggtccggcgttaatcgctacctcatgcaggcactctcccgtactcatttctagaaaggtttttcccgtcatgtctgaatctacttcttctgctaactccaccaccatcctcaacgacaccttcaacccgaagcctggcgtaccttatgcacgcgtcgataatctcgaatttgccacacgtgacgaattccgcgcttgggctaccgcagagatggaggccggtaacgttatctctgcaaccatcgccaatgccccacgcgaagaccgcatcaagtcttttgtcatggatcttgttcgagacggtattgacgacgctgctgaggaaatcgtctcacgcattgatagcggtgacttcactatgaaggaagctctcaccgcgatcgcggcatcaatcaacgacctcgatgctgacgatgtagtcagcgacatcgttgaaaaccacttcaactagtcaacacaccagccctccac

SEQ ID NO: 2406 - protein, 126 aa, Corynebacterium glutamicum
MSESTSSANSTTILNDTFNPKPGVPYARVDNLEFATRDEFRAWATAEMEAGNVISATIANAPREDRIKSFVMDLVRDGIDDAAEEIVSRIDSGDFTMKEALTAIAASINDLDADDVVSDIVENHFN

SEQ ID NO: 2407 - DNA, 3888 bp, Corynebacterium glutamicum
  CDS (101)..(3865): RXA01770
tgctcatgacaggtaattcaacgcgttaccctgctgcagcataaaagaacctgcctcaacacacctccactttttctacttttaagaaagccacattctcatgccaattatcattgataacctcaattctgacgacgactccaccatcggcactgccaccgaatacaaccctgacactgacgccgatttacttgatgctattaacgctgatgctgaccttgatggcgacgccaccatcagcactaacgcgacagaagaaggtgtagacgcagcagctgaaaaacctaagaaaaagcgtaaagcccctgctctgaagcctaaaggactcacggcaaagttcttccaccgtgatcttactggcgtaggtggtaggaccggtcgcctcaacaagaacgtacacccgaccaacccagatctgtcctaccagccagtctctgatgtctacaccccacaatcagcagatcacaagggtattaagacccgctacatccttacccatccaacccccgctgttgttctcagtgagtccatcagcaacgcgtttcatgtctctaccctgcgtcgcaacaataatgtcaacaactctgattcggaattggctgcctggccgtacctctaccaactcgatattccgcagctggaccagatgattaatgtcgctgacatctgtgattaccatttccacggatataacctgtgggtggattttaccccgcagactatcgctctacgatccggtaagacggtactcgatgacggtaccaccgcctctgataacaccactcatgtctattaccgcgtcaccgttcacgttattgccggtcaagatcatggatctactctgcttgatgaccagggcaaccaggtgcttgatagggatgataatcctatttctaccccaagtatcaagcgtattggcgctgtcactgatcttttcgatcacaatccttttggcttcgctagtgtaaactctttcgcatttgtcgatttctcatgggacccagccaccaccttggtcgatatgctcaacaaccttgattcatatctctctaatcacatcaatattgccagctccccaacccccattgccctcgatatggttgtgctcaatgaatggtctgaaaagtcctatcagctgtgcgaacgcgttgttgcacaggcaaagctcatcaacagcaacaagatcaccgcacatgtgagtgatgtcatcaagcaaaatgcccacaatatcttgtggtttaccgaacagatgaaccctggcaccaccaacctcagcgaggtacctatctccaagaagtctatgctgccgatgtctcgccagctacgtattttggagcactacgatgtaccactgaccgcgtactctgctcttttctggactgtcagcgccattaagaatgaatctatggtgcagtaccttgtgcgacagaatatgcagctcaccttgagctcaaatctggatgcactcaactccattgtctcccagctccctgtaccagataaggacgttgtggctgcttctggctaccagattcagccacacttctccacgcagcagcgtgaagcaatcaccactgataatcctctcgcgattattcaggccggtgctggtaccggtaaatccaccgtgattctggaacgcattgagtacttgtgcgctgcaggcaccaaccctgaagagattgctgtgctgtcttttactaatgctgccgccgataacatcacagcaaaaaatgacaaggtgacctctatgaccatctccaagatggttcatgagatttacgcacacaatttccctgatcatgagatctccaccatcgacaccattatcaatacgcttgatattgaatacggcgatcaaatggtgacctccgattacatgattcagctccgtgacctgctctataaggtcatgacgcagggtggcaacgccaacctgacagcgttgagcatcttcatggaatcccatatcgaggcgttcatctcggtgttggatcagatcaagcagacttctcttgagctggaaatcatcatctgctacctgctcttggataagctgatcgagcctcatgcatcgccgaagtacctcattattgatgaggtgcaggacaactcggtcttcgagttcgtctttgcacttcgttttgcggcaaagcacaatacgagtctgtacttggtgggtgactcgtcacagaccttgtatgagttccgttctgctaaccctaaggctctgaactccctggaagcatctggtgttttcggtacctaccgtttgaccaccaattaccgttccaaccaggaaattcttgacttcgctaatatccacctctcggatattgaagctaaccagttcgcaggtattcagctctacgccaactcttttgatgcacctactgcggacagcttcaaagaaaaggttgaactggacatgcaccatgtgtctaagcagtctgagtttaccgacagcattccttatttcatggagtccaataaagctcgctttgatgctgcgatcttgaacaatgagcaaaccattgtgcttgctcattctggtcgtgaaattcgtgcagcgcagcaagcgctagccgagatgtaccccagcatcacggtgcgtaacttgcagtccgataagggtttcaacaacacggtattttcgacctttattaaggatttctggtttgaggtcaccgctgtagacccagctcatgccgcatttacctttaccagccaagtcaccgctcatctagataagttggtacgcggaaagcgtgagcagatggaggatcgcgttatccggtctatggctgcatggtggcgtgaaaatgagcgtgacatccagggttgggtgcagcaaactcagtccggtgcgatcaccaacgaagagttcttctaccgtcttcgtcagtgcattcttgactatgaaatcaggaataaccgagcacgtcagtccatgctcaatgcgcgcaacaacgctaacaaggaggctgtcgcacaggagaaaccactgctcatggtctccaccattcacagtgcaaagggtctggaattcgataatgtcatcgtgcttcaaaaaccaagctccgatgcagagatgaccgaagaaggtaagcgcgcaacctatgtggcgctgacccgtgcaaaaaagcgtgaactcattattgctggttctactcgcgcatacccacgcatcgtcaccgattatgagcaaatcgttgatcttcttgaaaagcgcgatgaggagcgcaaaattaaggaggaagaggctgcagcactcgccacccttgaagctgaacaggagacgcgcgcccttgctgctgctgaggcgcaggctcaggcgttgttgcttgagcacaacccgtggttgcgtgatctcagcgatgaagaagtcactgctctaactgagcaagagatcatcaacaatgttgagccagccctacagattgaagaagaggaggaagaggctcgtgcactcgctgcagcagagccagcaattcagcagtacttgtctcagtttgctttcgatgagttcccggacgacgacaatgtagccaacactgtcgtacatgtagcaccacagcctattctccaccaggcagtgcctgcagatgtgactgtacaatcaagcaccgcccccgtaacacctgttgttgcggatcttgaggtaaccactgttgcagctgatccagtcgaaccgactatcgttgctgcacagcctgaggtggacgacaaccttgtctacagcacgtccacccctaatagtcacagtgacgttattgcagtgaactctgatacctcagaaaacgctgctgttaatccagttctgtccgatattgaggcactccgagcaattttcaacaaccaggactaaaacacctgctgctgttgagc

SEQ ID NO: 2408 - protein, 1255 aa, Corynebacterium glutamicum
MPIIIDNLNSDDDSTIGTATEYNPDTDADLLDAINADADLDGDATISTNATEEGVDAAAEKPKKKRKAPALKPKGLTAKFFHRDLTGVGGRTGRLNKNVHPTNPDLSYQPVSDVYTPQSADHKGIKTRYILTHPTPAVVLSESISNAFHVSTLRRNNNVNNSDSELAAWPYLYQLDIPQLDQMINVADICDYHFHGYNLWVDFTPQTIALRSGKTVLDDGTTASDNTTHVYYRVTVHVIAGQDHGSTLLDDQGNQVLDRDDNPISTPSIKRIGAVTDLFDHNPFGFASVNSFAFVDFSWDPATTLVDMLNNLDSYLSNHINIASSPTPIALDMVVLNEWSEKSYQLCERVVAQAKLINSNKITAHVSDVIKQNAHNILWFTEQMNPGTTNLSEVPISKKSMLPMSRQLRILEHYDVPLTAYSALFWTVSAIKNESMVQYLVRQNMQLTLSSNLDALNSIVSQLPVPDKDVVAASGYQIQPHFSTQQREAITTDNPLAIIQAGAGTGKSTVILERIEYLCAAGTNPEEIAVLSFTNAAADNITAKNDKVTSMTISKMVHEIYAHNFPDHEISTIDTIINTLDIEYGDQMVTSDYMIQLRDLLYKVMTQGGNANLTALSIFMESHIEAFISVLDQIKQTSLELEIIICYLLLDKLIEPHASPKYLIIDEVQDNSVFEFVFALRFAAKHNTSLYLVGDSSQTLYEFRSANPKALNSLEASGVFGTYRLTTNYRSNQEILDFANIHLSDIEANQFAGIQLYANSFDAPTADSFKEKVELDMHHVSKQSEFTDSIPYFMESNKARFDAAILNNEQTIVLAHSGREIRAAQQALAEMYPSITVRNLQSDKGFNNTVFSTFIKDFWFEVTAVDPAHAAFTFTSQVTAHLDKLVRGKREQMEDRVIRSMAAWWRENERDIQGWVQQTQSGAITNEEFFYRLRQCILDYEIRNNRARQSMLNARNNANKEAVAQEKPLLMVSTIHSAKGLEFDNVIVLQKPSSDAEMTEEGKRATYVALTRAKKRELIIAGSTRAYPRIVTDYEQIVDLLEKRDEERKIKEEEAAALATLEAEQETRALAAAEAQAQALLLEHNPWLRDLSDEEVTALTEQEIINNVEPALQIEEEEEEARALAAAEPAIQQYLSQFAFDEFPDDDNVANTVVHVAPQPILHQAVPADVTVQSSTAPVTPVVADLEVTTVAADPVEPTIVAAQPEVDDNLVYSTSTPNSHSDVIAVNSDTSENAAVNPVLSDIEALRAIFNNQD

SEQ ID NO: 2409 - DNA, 467 bp, Corynebacterium glutamicum
  CDS (34)..(444): RXA01773
tttcagcgagatggcgtgcgctttgatcatacgatgatcacccacattcaagccggcctgcatcttggtggctgccgcgcagcaggtttactgcctataccagcacatattgatcatattgtgcgcctgacagccgcagatttctatgacacccagtcagcaccgcagctgctcagcaacactgtgcttgatgtattggacaccaccactcaagacttgaaggcattgtggcctgttgcagaacatattgctacaaccattcctgaatctgagaacgtgcttatccactgccagatgggtatcaaccgctcagctgcactcatgacacgggtgttgatgttgcgcaacgattgcaccgccgatgaagcaattgcactgctgcgtgatcgacgctcaccgtttgtactgttcaatgagcattttgtggaacaacttcgagcactgtaagcgctcaaagacccattacc

SEQ ID NO: 2410 - protein, 137 aa, Corynebacterium glutamicum
MITHIQAGLHLGGCRAAGLLPIPAHIDHIVRLTAADFYDTQSAPQLLSNTVLDVLDTTTQDLKALWPVAEHIATTIPESENVLIHCQMGINRSAALMTRVLMLRNDCTADEAIALLRDRRSPFVLFNEHFVEQLRAL

SEQ ID NO: 2411 - DNA, 687 bp, Corynebacterium glutamicum
  CDS (101)..(664): RXA01775
gtggaaaccaaagacgaggaaagtatgtctatttgtttgtccccaggttgtccacatttgttttattccccgagaatgtcctagaaaggaactcgaccccatgtcctattcactcattatttctaaagcaccaacccactccatgccttttaatgaggctgaactcctagagcttgtcgatgaactgcactccgacaacaccgtgaaaaagccggttattgtgccactccccgatgatttctcctacaccgtagatagcgccgtgcgactacatgatttgggtgttgaccaggaactgactgactggattactgcacaagttgctgcagcctatccaaaccagatcgtctcagagattgctgctgcccctgatccgcaagccaagaccttattctccgccaatgcgtataacaccaggtcttttggtactttttggactgagcaccctattacacagctccaatacaagcgctgctaccaaattgtcatcgagaacgttacgggtgtctatcatccgttacctgttgataactaccgctacgtaccccctgtcacgccctcattgccacagccggtctaccacgaagctatcgccttaaatgagtctgatgtcgctgatcacggtactcgtgcagccaagcacgcaatgatcaaccgcaacgtataaccacacacgccacagatact

SEQ ID NO: 2412 - protein, 188 aa, Corynebacterium glutamicum
MSYSLIISKAPTHSMPFNEAELLELVDELHSDNTVKKPVIVPLPDDFSYTVDSAVRLHDLGVDQELTDWITAQVAAAYPNQIVSEIAAAPDPQAKTLFSANAYNTRSFGTFWTEHPITQLQYKRCYQIVIENVTGVYHPLPVDNYRYVPPVTPSLPQPVYHEAIALNESDVADHGTRAAKHAMINRNV

SEQ ID NO: 2413 - DNA, 1575 bp, Corynebacterium glutamicum
  CDS (101)..(1552): RXA01776
cgtataaccacacacgccacagatactcagctatctgtggcgtgttgttttacatcaacctctcacccatcccccatcactattaaagaaaatcaccatcatgacccacactgataccccagcccctgcacacggcgtaacaccgagtgaattcgctgttacctcacacgaactcaccacctcaccaacacctagtccgacacaggtcgctattgcagcccaggaaaaaattcgccagcgcaagctcgaagagcttaaagcaaaaaagcgcacagacacgacagctcaaccacttctacctgcacctgtgctgcatacacgcccactcccctcaccgaatccaccgcgaccatctccaccggcacctaccactggacactgggaacttcttattgtcaggtcacagcagaagaaaatgaccgcagccaatccctttctcaaattccttcatctcggtaaagccttcaacgtgaaagacctagggctcacctgcgatcgcaccactgatgttgacctctcacggcttggcaagctcaatccgcccagctcacttatccttgaactagcaacggcacttgacctgcatccattcctctcagtcgcactctcttcgcacagtgcggtcaacgcccgtcgcaaccaacttgaattaaccctgcacaaccatgacactcagggcacagcattaggtcacagcgttactatggtccagctacccgaggtcattaatcgagctgctgtagagccctatatcaaacccaagggctcgggcaatgacccgcttgaccaaagcctgaaccaccgcgcacccaccgtaagtgacgtgcaaaaagcccttgtgcaggaaaacacaggcacggcaacagacagcaacaactacctgcttccttttgatcctgattctggtgcaccaaaaaccaccgcgcttaatgcgcctaataaggatctcctacaggccaggcatgagcttgcctatattcccgagatccccgccattgcatcgtggctcgatcaccttgaccccatcatgcgtgtgcaccgtagtcttgcgctttcaattttcccagtgcagcttctacgtgctgccgttgagaatctccctcataacgtaaccgatctgcataatcaccttgatcctgaggatctgctccctgaggaactcaccacctggctcgatcacctcttcgatgcagacttaaccgctctcgcttcatgcccacagcttgcaccacctatcgtgcgcagccacaatcacgccaaagcgatcgcagctatcaccgtgacctctgtcatggacgctctcatcgccaaaactcttgatgcgcatgacgatccactgccctcactaccggagtttgtagaactactgcgtgacgctgtagcccagctcgcagcgcattttaagcagcagcgcggcgaggtactaccgcagcccaatggcttgcgatacgccaccgactttggcctgctctcttatattgccgatggcttacatgaatatgcacttgccatcgacttcgggctgatctacccgaatgaactcatcaccgagtaaacccactcctagaaaggtct

SEQ ID NO: 2414 - protein, 484 aa, Corynebacterium glutamicum
MTHTDTPAPAHGVTPSEFAVTSHELTTSPTPSPTQVAIAAQEKIRQRKLEELKAKKRTDTTAQPLLPAPVLHTRPLPSPNPPRPSPPAPTTGHWELLIVRSQQKKMTAANPFLKFLHLGKAFNVKDLGLTCDRTTDVDLSRLGKLNPPSSLILELATALDLHPFLSVALSSHSAVNARRNQLELTLHNHDTQGTALGHSVTMVQLPEVINRAAVEPYIKPKGSGNDPLDQSLNHRAPTVSDVQKALVQENTGTATDSNNYLLPFDPDSGAPKTTALNAPNKDLLQARHELAYIPEIPAIASWLDHLDPIMRVHRSLALSIFPVQLLRAAVENLPHNVTDLHNHLDPEDLLPEELTTWLDHLFDADLTALASCPQLAPPIVRSHNHAKAIAAITVTSVMDALIAKTLDAHDDPLPSLPEFVELLRDAVAQLAAHFKQQRGEVLPQPNGLRYATDFGLLSYIADGLHEYALAIDFGLIYPNELITE

SEQ ID NO: 2415 - DNA, 582 bp, Corynebacterium glutamicum
  CDS (101)..(559): RXA01777
ccgatggcttacatgaatatgcacttgccatcgacttcgggctgatctacccgaatgaactcatcaccgagtaaacccactcctagaaaggtctttacccatgtctcgtatcatcactgctcccgtccacaagccttatattattgctcgtgaagtcaagggggtctcccatgtccacgacactgttggcggcaagtggcaggccaccttgcacacacttaaaccggggccctcctggccgaaaccgtcacagttcactgcgcctaaatccacgtccatctggtttattgcggtagcaacccacccacgtaacccacgggcacgcaaaggtaccctacttggtcgcggtggtctttacgaactcaaagacactgatctgaactttctcacagagcgacaggatttgctcgccacatctacctctcgtgacccagaggattgccgtttacgctttaattcgcgtcacgatgcagcagcatttttacatgctaacgcccgccacatcaacaagctttttcatccagcactaggtcatgctcgctacgatctcatagatgtgtaagcacaacgcttagcttatga

SEQ ID NO: 2416 - protein, 153 aa, Corynebacterium glutamicum
MSRIITAPVHKPYIIAREVKGVSHVHDTVGGKWQATLHTLKPGPSWPKPSQFTAPKSTSIWFIAVATHPRNPRARKGTLLGRGGLYELKDTDLNFLTERQDLLATSTSRDPEDCRLRFNSRHDAAAFLHANARHINKLFHPALGHARYDLIDV

SEQ ID NO: 2417 - DNA, 1260 bp, Corynebacterium glutamicum
  CDS (101)..(1237): RXA01778
ctactaccccctccgggtgtggggtagctgtaacaactaccccacaatcttagccggtcttccatacataactgcgaaattggttagagtctttttcatgatgctctaccaacacaccacacgcgggctgatcattagtgacgcgatcatcgcgaaaatcagccaagtcaaccaactgctgctactaagacccacgctgttgcaagacaaagatatgcaccatgcgacattgagtagcgacaccccatcaattcgcagtcgccgtcgctcctatcgcgagaataaagccgcctatgcgaccacgagcaccatcagaaaccgtgagacctttttcagcacatctgatattgatttcgccatactcatgattcaggacgtacaagaatctctcgtatcttttgaccccaccttggctcaagatatgaagccaagaaccaacgcagtcatttctgcactcaatgagctacgcgagccactggataccttctaccgtgcccatgaatacggtgacatcatcagcgatggtgcttatgagttcgatcatgctgccattgatgcacaacacagccttagtgaactcgttgccggtctgcataattatgacaacctcatgtttccccaggaaaccgctccgttgatgagtgaatccaatggcattcagctggctcagtactataagtccaccaaactcgatgagtcacaattgacggtggaacctaatgagcctggtatcagcattatgtggcacgcccatgatttcacctggtcttgcctagtgcgctatgacgacatgaaccgttaccctgagcatttcagcatttcttttaaagacatgctgatccctgaacagatctatactttccacttcaccccacgtgaggcaatgcaactgcgcaagggactttttaatgccatcgctgcctacaagtctcagacatggggtgatgagaacactgatctcaccaaggctgaactcgaatttggtggcacctccatgaccttccgcgccggcctctcacagcttagcgtcaccggacctcctgatcaccgccaggtgttctgcttgtcgtcttctggtcgtgaggatcacaacaccccgccaaacatgcgagacggacatgtcattgatattgcggttactcaattgtccaccctgcgtaacctcattcgggtactgtgcaccactcacccggatcattcaccagcactgctaccttatggtcagcagtacaccatctaacatgctctaactcgaccccg

SEQ ID NO: 2418 - protein, 379 aa, Corynebacterium glutamicum
MLYQHTTRGLIISDAIIAKISQVNQLLLLRPTLLQDKDMHHATLSSDTPSIRSRRRSYRENKAAYATTSTIRNRETFFSTSDIDFAILMIQDVQESLVSFDPTLAQDMKPRTNAVISALNELREPLDTFYRAHEYGDIISDGAYEFDHAAIDAQHSLSELVAGLHNYDNLMFPQETAPLMSESNGIQLAQYYKSTKLDESQLTVEPNEPGISIMWHAHDFTWSCLVRYDDMNRYPEHFSISFKDMLIPEQIYTFHFTPREAMQLRKGLFNAIAAYKSQTWGDENTDLTKAELEFGGTSMTFRAGLSQLSVTGPPDHRQVFCLSSSGREDHNTPPNMRDGHVIDIAVTQLSTLRNLIRVLCTTHPDHSPALLPYGQQYTI

SEQ ID NO: 2419 - DNA, 1542 bp, Corynebacterium glutamicum
  CDS (101)..(1519): RXA01779
ttagtatttagtcaattagccaactacgataaaactagtgaataaacatactagttcactttgtcgcgcttaaaatactagaaagtaatataaaaaactcatgcgttatactccccgtacccaccgcgcactcggacttgctgcacttaccgctacagctctcctactgagctcatgctcgaccaccgctgaccttctcggcgccgattctgtggcgcaggctgtcaccgatggtggctctgcccttgatcccactgcagctcatgtgctcaccatcaccaatgccactgcaatgactcttgctgagctaccagaaaacaccgaccctgacgcagccaataacacggagccaacaatggcccaaagcgccctcaagcgtatttacggtctcgaaattgccgccgatggcactctgattgctgtcgcagcgccattaacctcgcgaaatagtggttctgagcagcctactgtcgcagcaatggctgatccagaaaacaatgctgaactcaccacagcacatattcttgagatcgacccagccacaggaactgccacaccacgtcaagatattgctctgactgaagattttcagaccatggctagctcttttagccagatccgtaatggctggggtactacccaactcatcggacaacaccctgatgatcccaagcaacctattcgttcagctgatacctggactgtcaccggctccactcagatcaccggctttaacaccaacaccccaacgggaaccgaagatgctgcctacaccatgccggcgactgagccagctgtgggactgtgcgctctagaatcaggctccgatgcaccactggatgaacaccgtgagctcagcaccagtgcattgcgtaccgcatcagtattgtcgagctctggatctgccaccctcaagctgcatgatcctatggtcatgtctgctactggcattgtccaagcacgcgcctatgtcgatggcgaagtcattaaccagcacgagattggcgatctccgcgagcagctcggtatcaccatcgaagaatctgaggctgctcaagcagaatcggatgcccaagcagccaccgatcacccacttgcagccctgggcttaagcaaccccaccagctcagcgttggttccaggtcttgctgagcttgattgtctcagtgctgaccaggctgccacctggcataaccgcgacaccagcattggcaccggtaagcccagcgtgcttgctgtcatcaacgcggaaatggccgatgactttaccctgcagctgttgagctcaggtgccaccactgccgaaacgcagcttgcccagctgccggatgaaaccgcgttcgtgctcattgacccatcatctggtgctgttactgacctgttctttatccaaagtctcaacactgatctgccggcaccaacaacccagattaattctattgctgttgatgagcgcgaccccaacatcatctacgccacttttagcggcgatgaccacctgtaccaaatgatgctgggttagttacacaactaactaaccag

SEQ ID NO: 2420 - protein, 473 aa, Corynebacterium glutamicum
MRYTPRTHRALGLAALTATALLLSSCSTTADLLGADSVAQAVTDGGSALDPTAAHVLTITNATAMTLAELPENTDPDAANNTEPTMAQSALKRIYGLEIAADGTLIAVAAPLTSRNSGSEQPTVAAMADPENNAELTTAHILEIDPATGTATPRQDIALTEDFQTMASSFSQIRNGWGTTQLIGQHPDDPKQPIRSADTWTVTGSTQITGFNTNTPTGTEDAAYTMPATEPAVGLCALESGSDAPLDEHRELSTSALRTASVLSSSGSATLKLHDPMVMSATGIVQARAYVDGEVINQHEIGDLREQLGITIEESEAAQAESDAQAATDHPLAALGLSNPTSSALVPGLAELDCLSADQAATWHNRDTSIGTGKPSVLAVINAEMADDFTLQLLSSGATTAETQLAQLPDETAFVLIDPSSGAVTDLFFIQSLNTDLPAPTTQINSIAVDERDPNIIYATFSGDDHLYQMMLG

SEQ ID NO: 2421 - DNA, 498 bp, Corynebacterium glutamicum
  CDS (101)..(475): RXA01780
ccacttttagcggcgatgaccacctgtaccaaatgatgctgggttagttacacaactaactaaccaggcaccaacattttcttaaagaaacacccttatcatgacttttctccaccccaaggctgcgttctaccctctcaccatggatcatcttaccgatctcggtcttgatcctgagcaactcattaatgagttgccgacgattacctacgacgttcaaccacacaatgtctttgttctacagttcagcaccgccgatgtgcgcgtctaccaggaaggtaataccctttttatccgcagtgctgaattaatcaaccctgaactacgacaacgacagcgcacacagctcaacgacgatctcaacaaccctgcttcacttcgcgtctgtgatgagatcagtggccgcagcaccgtgttcctcaaagacaaaagtgttgtcactcacgatcacgggaccaattgctgtgattccgcataatcctgatgaagccagcgcca

SEQ ID NO: 2422 - protein, 125 aa, Corynebacterium glutamicum
MTFLHPKAAFYPLTMDHLTDLGLDPEQLINELPTITYDVQPHNVFVLQFSTADVRVYQEGNTLFIRSAELINPELRQRQRTQLNDDLNNPASLRVCDEISGRSTVFLKDKSVVTHDHGTNCCDSA

SEQ ID NO: 2423 - DNA, 384 bp, Corynebacterium glutamicum
  CDS (101)..(361): RXA01781
cgacagcgcacacagctcaacgacgatctcaacaaccctgcttcacttcgcgtctgtgatgagatcagtggccgcagcaccgtgttcctcaaagacaaaagtgttgtcactcacgatcacgggaccaattgctgtgattccgcataatcctgatgaagccagcgccaaggctgtcgctaccaaacataagcacaccttgtccggcgctacctctgatcacccttatgccggcatgacgcttaaagacatgattgaacagggctttacgctcacaccgctggaattcccgctctgtgctgtcgatgatccaacagattctgatcgcaccatgcacgtgatcaatgttcgcgagcacagtatgtagattctaaagtgcggtacaac

SEQ ID NO: 2424 - protein, 87 aa, Corynebacterium glutamicum
VLSLTITGPIAVIPHNPDEASAKAVATKHKHTLSGATSDHPYAGMTLKDMIEQGFTLTPLEFPLCAVDDPTDSDRTMHVINVREHSM

SEQ ID NO: 2425 - DNA, 519 bp, Corynebacterium glutamicum
  CDS (101)..(496): RXA01782
acgtgatcaatgttcgcgagcacagtatgtagattctaaagtgcggtacaacctgtaccgcccacacaattccaccctttaagaaaaggacttagccatcatgaccaccttcgcccttattgctagccccaacaatgttgatcccactgctgagtccccactcgccattgaaatccataccgatgaggacagcagctatccactagggcttattgactcagaccacctggttcctgctgtgatttacggcgatatggtgatctacaccaaaacactgctcgcacagaccccaccagatgatgtgtccactgctagcgccttcttcgacaaactcaccgcacttgacgctcagggtcgcacccgtgatctggtctacagcgccacctacagccaacttgttattgccggccacaaccgcactgtattaactgacgactcagagttctacgatgagttttaccaggttattgaggctgctcctggggtgatcttgaaatgatgtttatcgggcaacacctc

SEQ ID NO: 2426 - protein, 132 aa, Corynebacterium glutamicum
MTTFALIASPNNVDPTAESPLAIEIHTDEDSSYPLGLIDSDHLVPAVIYGDMVIYTKTLLAQTPPDDVSTASAFFDKLTALDAQGRTRDLVYSATYSQLVIAGHNRTVLTDDSEFYDEFYQVIEAAPGVILK

SEQ ID NO: 2427 - DNA, 360 bp, Corynebacterium glutamicum
  CDS (101)..(337): RXA01783
accaggttattgaggctgctcctggggtgatcttgaaatgatgtttatcgggcaacacctcacacttaggctaggtctctaacatgaagcagatagcgccatgatcaatctttttgctgcagccctgcccgcattcgagcctttgagtattacctccatactcgtgctcggtgctgtggcattgatctgtggcctccctgtttttctcgcactggaaaaaagcgctgagctcgatgatctcttcgcagcactcatcatcgctgtacttttaggttttgctgcttatacgtttgtgctccccaagctcgttgaattgggctgtactatttgccagctctgactagcgacacttacactttc

SEQ ID NO: 2428 - protein, 79 aa, Corynebacterium glutamicum
MINLFAAALPAFEPLSITSILVLGAVALICGLPVFLALEKSAELDDLFAALIIAVLLGFAAYTFVLPKLVELGCTICQL

SEQ ID NO: 2429 - DNA, 699 bp, Corynebacterium glutamicum
  CDS (101)..(676): RXA01785
gaccctggcccaactttgcaacagcaccatccacagtgatggcactaccaatactgagcctgactacgcatctaaggcggcgcacattagtgatgcaactgtggatcagttcgttgagttcggcggtggacaagcaaacattaaccctgatggatcagcgaccgttgattgggagggttctttcagcatcaacttctacgatggtttggtgccgtttaccatcacgaatccgcacctcgaggtttctgtagctggtactggtgttttgactggtgacctcactagctatgcagtggagatgtcgaacccgaatgagaaaaccccgttgactgacttgtatgaggatgtcacgatcacaacgtttgggggagtgaaccttgatcctgaaggtgttgtgacaagcaatcctgattatgacggagtgattgttgatgtcccactggatgccacctctcaggttacttccggtgcaggttggggagcgtggccgcagggcttccttgatttccactttgataccaacttgccttcctactggtattcctcagatggcgcaggtgatcctaagaaggcgcctatgagctttaatgttgatttcactaatggtccaggtctggtgaacagccaattgctccacaggcaagtgatctcaatgccggaaaccaaggcagtctcgtagttccatcggaggcagaagct

SEQ ID NO: 2430 - protein, 192 aa, Corynebacterium glutamicum
VDQFVEFGGGQANINPDGSATVDWEGSFSINFYDGLVPFTITNPHLEVSVAGTGVLTGDLTSYAVEMSNPNEKTPLTDLYEDVTITTFGGVNLDPEGVVTSNPDYDGVIVDVPLDATSQVTSGAGWGAWPQGFLDFHFDTNLPSYWYSSDGAGDPKKAPMSFNVDFTNGPGLVNSQLLHRQVISMPETKAVS

SEQ ID NO: 2431 - DNA, 564 bp, Corynebacterium glutamicum
  CDS (101)..(541): RXA01788
cctttaacccaaattcctatatcactacagataccgtgcgcatcgttgtcgatcctgtaccggaaactaatcccgacgatgagaaagcaggacgctagccatgtctcgcagctaccccatctacatcatttcttttgccccagcggatgatctccacggcgttggaggattcgagtgggttccagcatcaacaccagaaaacaaagctgccgccttcacgacctttgatcgtcaattcgatgattctcgtaacaatggtggctcgcatattgtgcgtctactcaatatctctgatcccaatatcacagcggatatgacccaagacgatattaccgcgtacctcgactcaaacatcgaccgctgggaatccacggaacatgcgctcaagcagtttgtcccacttaacgcgggtgctgatcgcgtacctaccggtggtgccgacgagcacattacccacgcctgccgcataataactgtgcagcgtagctgcacacggattcacctgcgctgtggatgcatcccaacaccacaacaccgcccctagtgccataaatgctaggggtg

SEQ ID NO: 2432 - protein, 147 aa, Corynebacterium glutamicum
MSRSYPIYIISFAPADDLHGVGGFEWVPASTPENKAAAFTTFDRQFDDSRNNGGSHIVRLLNISDPNITADMTQDDITAYLDSNIDRWESTEHALKQFVPLNAGADRVPTGGADEHITHACRIITVQRSCTRIHLRCGCIPTPQHRP

SEQ ID NO: 2433 - DNA, 765 bp, Corynebacterium glutamicum
  CDS (101)..(742): RXA01789
tgcatcccaacaccacaacaccgcccctagtgccataaatgctaggggtgtttttttcatacccacaacaccgttcttctctagaaagagactcgatactatgcctcataaccccatcgaacttcacactaatgatgtactcgatgctctcgacattgacgccatctgcgacgatgtgtttctctacaccgacttcgagcacaccccaggtcagcttgatcgcttcgagcaactcgccttcacaaaaatctacgacatgctggaaacagctgctgaaaaattcccagatgtagcaattaatgacactttaagcactggcaaccacgctgctgaacagtactttcttgccaatcccggcaacatcatcgtgctgaccagcttcgcgctcaatcagaccgatctccgcgacctcataatctcaccgtgcattaagtacacagcacatgcacgagcactcatgcgtgcggtgacacgaacattgtgcactgcaaacaaccctgtagaacgcgcgactatcttccctgtgtctgtcgctaatgccttaagcatcgaagcgctgtgttccgaatatcatgcgttccgcaccaagcaggtgctcaacactgctgcactcatcaatcctgataacactcttatacccatgttgttgagcaaagcgtatgaggcatacgcctggcacaagggtgtcgaatccgcgcaacgaggtagcaacctagctcgtgagtactacgcaggacttatctgaaaattcactactcaactctg

SEQ ID NO: 2434 - protein, 214 aa, Corynebacterium glutamicum
MPHNPIELHTNDVLDALDIDAICDDVFLYTDFEHTPGQLDRFEQLAFTKIYDMLETAAEKFPDVAINDTLSTGNHAAEQYFLANPGNIIVLTSFALNQTDLRDLIISPCIKYTAHARALMRAVTRTLCTANNPVERATIFPVSVANALSIEALCSEYHAFRTKQVLNTAALINPDNTLIPMLLSKAYEAYAWHKGVESAQRGSNLAREYYAGLI

SEQ ID NO: 2435 - DNA, 183 bp, Corynebacterium glutamicum
  CDS (101)..(160): RXA01790
gaaaggctcgaacacccatgatcgttgaggtagctccgagaccgaagagatcagcctcattgatgatgattcccctgatctcgatgaggacgataacaccgtgctcatcgccgaagacatccgtgatatggatgactatggcgaagatcatcctgatctttaaagctcactgttaagcccgca

SEQ ID NO: 2436 - protein, 20 aa, Corynebacterium glutamicum
VLIAEDIRDMDDYGEDHPDL

SEQ ID NO: 2437 - DNA, 486 bp, Corynebacterium glutamicum
  CDS (101)..(463): RXA01791
ccgcctgtgcaactaaccctgttgtgcaggcggttttctctatctacaccaacaactccacaacactatccggtccaaatctagaaaagagacaacccccatgacctcccccaccacgttaaagccctggtctattcgcggacccatcgacggtgaatacaccatgcttgaggcatatccgtttcagtatgtagcaaatactcgcccggccatcatgctctacgcactcgatgaaaacggtgtaccggaacaatatgccgacctcaccatcaaccttgccgatgtggagctcaagcaacttaaccacgtcatcattaacccagatctgcacgctgatgttaccgaactgtgcattagcgccggcctgctgcgacctggtgttctgggccagcaccaagtcggtagcaccaccgccaaggtctaccgactcactgagcgtgctgatggctggctacagctgttttagcagctacctgcgcctaatcc

SEQ ID NO: 2438 - protein, 121 aa, Corynebacterium glutamicum
MTSPTTLKPWSIRGPIDGEYTMLEAYPFQYVANTRPAIMLYALDENGVPEQYADLTINLADVELKQLNHVIINPDLHADVTELCISAGLLRPGVLGQHQVGSTTAKVYRLTERADGWLQLF

SEQ ID NO: 2439 - DNA, 396 bp, Corynebacterium glutamicum
  CDS (101)..(373): RXA01792
gactcactgagcgtgctgatggctggctacagctgttttagcagctacctgcgcctaatccccccacccatactcactccaaaacaagaaagtagtcatcatgcctcagtacaccatcacaatcaccgacgagcagaaagctgttctacacagcctcaccaacccccatatcgccactgctgaacacggcgctatcaccgcaatcgagattcatgacgaccacgatgttgttgtctatcacgttcaaccagacggcacactaacttacgagcgccttgttgaaggcttccattacggctggacacgttttgacagcgaaggttttgagatcgactccgacaataaccgcgttgtagacggactccgcgacgaatagttaacaacaacgaccgcaca

SEQ ID NO: 2440 - protein, 91 aa, Corynebacterium glutamicum
MPQYTITITDEQKAVLHSLTNPHIATAEHGAITAIEIHDDHDVVVYHVQPDGTLTYERLVEGFHYGWTRFDSEGFEIDSDNNRVVDGLRDE

SEQ ID NO: 2441 - DNA, 357 bp, Corynebacterium glutamicum
  CDS (101)..(334): RXA01793
ccttctctgcaggctacgcagtgctgcgcctagttcgcagcctgcgccgacttttgcagcgccactaaacacccaaacacaacaagaaagaaacaccactatggcacaataccgcgtcagttttatcgcgctcgccgagtcaaccatcgaggtcgaagcagacagtcctgaagaagcactcgacctagccaatgcagaatttgactacccggtcaccttggccggcgatccctatgagctgcacgactgggaagcacgcgctgaaattgaatggctcgataccagctcgaccccgcagcaacgccttggagaacatgtcgtcaagatcgaagattaaactcgatcattaaacacact

SEQ ID NO: 2442 - protein, 78 aa, Corynebacterium glutamicum
MAQYRVSFIALAESTIEVEADSPEEALDLANAEFDYPVTLAGDPYELHDWEARAEIEWLDTSSTPQQRLGEHVVKIED

SEQ ID NO: 2443 - DNA, 357 bp, Corynebacterium glutamicum
  CDS (101)..(334): RXA01794
ataccagctcgaccccgcagcaacgccttggagaacatgtcgtcaagatcgaagattaaactcgatcattaaacacactcttaagataaggacactaattatggcaacccaccgcgttcattttgtcgcaaccgcatccgcctacatcgacgttgaggcagattcccccgaagatgctatagaaaaagcgtatgatctcgccggtgatctgcccggcctcatcgccgacaacgaatttgatctcggtgaatgggaggtacaggccgatgtccagtggcctgataactctgtacctcgcgagcaacgccttgaagagggcgttgacctgctcgattaaacagaattaactcaaacccc

SEQ ID NO: 2444 - protein, 78 aa, Corynebacterium glutamicum
MATHRVHFVATASAYIDVEADSPEDAIEKAYDLAGDLPGLIADNEFDLGEWEVQADVQWPDNSVPREQRLEEGVDLLD

SEQ ID NO: 2445 - DNA, 1317 bp, Corynebacterium glutamicum
  CDS (101)..(1294): RXA01799
tattttgggcatgcactcgtcatatcttcacagacgtatggttttgtaacaacctcccccaaaatccccatagtttcccccggtgcatatccttaaaggtatggaaattccgctgcccacatcccttatcgatgtcatcactgatggtgccctcggccaaacctgcattgatcaggcatttgctgcccaattggggcgagttactggagtcgaattcaacctttctgacgataaaaccgcggctgaagtgaggatcaataaggcgtcggggagtccttttgataccaccggtgaagtcattgcgtggattaataatcaggaatttgagtgggtcagcacgcgcggtgaggatttgggactgcctgaattgcagggcattcagccgctcgacgatgatctgatcaccgccgcacgcacgctgtatagcaatgcgccggcgttcatcgccccgttgcgcgatggtcgcagggcgttggttgcgatcaatcacacgccaaaactggttggtatccgtcgcacgctcatcgaaggcctgcaggcgctgaagcctggaactgacctcaaacgggcattgacttcatttgctgcattctgcgaactgggcatccgattcgatgacaaccgcatctccttcagcgatggcacctcgctgttgcttcgtggcggcaaagtcatcgaaatcgcaggcgggctgagcttgcgcgacgtacgcgcggatgcggcgttcatgtccgctgagcatcaattgcttttcgacgccatctcctcgtctcacaacgtcacctttgacccacacaccaacgtggcgaccgtggcaaacgaacaccaagttcacgccatcccccttgctgttatcgacggcacgcgttgggtatggacatggtctttaaaagaactcaatggtcaagcaactgaaggccttgcccgctttggtttcgataacggcctactactgctcaccaatgcagagatccttgctgaggaagccaccgcattcaacctgattgatgtggctaaacaggtgctcaacacttggacgcacaccatcgtgcagcaacctgatggcaccggaattgtcctgctgctggatcatcctcggctgcagcttccgccagcatcacatgcagctgttgaggccacgctgtatcaccagctaccaggcgatattgatgcccgccgcgcggtggcgtcctatgcagctcaccgacagcttccttttgatggctacgcactcaccgttgagggccaacaagtcggcgtgacttttgacggcgagcatttaacaaaggtgggctagttttctagcaaaacccaacc

SEQ ID NO: 2446 - protein, 398 aa, Corynebacterium glutamicum
MEIPLPTSLIDVITDGALGQTCIDQAFAAQLGRVTGVEFNLSDDKTAAEVRINKASGSPFDTTGEVIAWINNQEFEWVSTRGEDLGLPELQGIQPLDDDLITAARTLYSNAPAFIAPLRDGRRALVAINHTPKLVGIRRTLIEGLQALKPGTDLKRALTSFAAFCELGIRFDDNRISFSDGTSLLLRGGKVIEIAGGLSLRDVRADAAFMSAEHQLLFDAISSSHNVTFDPHTNVATVANEHQVHAIPLAVIDGTRWVWTWSLKELNGQATEGLARFGFDNGLLLLTNAEILAEEATAFNLIDVAKQVLNTWTHTIVQQPDGTGIVLLLDHPRLQLPPASHAAVEATLYHQLPGDIDARRAVASYAAHRQLPFDGYALTVEGQQVGVTFDGEHLTKVG

SEQ ID NO: 2447 - DNA, 843 bp, Corynebacterium glutamicum
  CDS (101)..(820): RXA01800
ccagcgcagttcataaaaccgccaaacttttgatagcgtagcaatggccctttcggtggatggggccatgtttgcacaatgcttgaagaagggtagggcagtgaagccgctgggcaagatcgccgttccttggacttggtacctgggaattgttggggtcatcatatttgatgtggtggcagcaataacgatgctcaccctcgtgcccaacaaaatgcccgaaagagtcaacagtgggcttgtcgcgctgggtggatcgtatgcacccccgatgagccgggaaacactcattgccagagtcattgccggtgcagtgctggttctggtgatttctttaggtatttcgctgctgatttccgcgcagtccaagaacctcgcgtccgatcacccggatgcatctgccattcagattgctcggcgttgggcgtttttgaacaatattcaaagctgtatcggctggtttagtttcttcctcgcagcgattttgagcatctcatcgctaagactcaacggcccaggtgccaccacgcatcttgagatggccgtttacatcatcgctgtgtcggtgttggcttgggcgttgatgatttccttgcgacgcggccaggtggcgattgatcgtgccattccaattcgggaagatgattccgaactgaaatggggcatgatctaccacgatgcttcagacaaacgagttttcgtggaactcgatgatggccacacgaccgtcatcaacatggcgcgcgggggagcgtggctgctcatcgcagtgatggtgctgcctgcgctggccatcgtcggttgggttttgctagaaaactagcccacctttgttaaatgctc

SEQ ID NO: 2448 - protein, 240 aa, Corynebacterium glutamicum
VKPLGKIAVPWTWYLGIVGVIIFDVVAAITMLTLVPNKMPERVNSGLVALGGSYAPPMSRETLIARVIAGAVLVLVISLGISLLISAQSKNLASDHPDASAIQIARRWAFLNNIQSCIGWFSFFLAAILSISSLRLNGPGATTHLEMAVYIIAVSVLAWALMISLRRGQVAIDRAIPIREDDSELKWGMIYHDASDKRVFVELDDGHTTVINMARGGAWLLIAVMVLPALAIVGWVLLEN

SEQ ID NO: 2449 - DNA, 444 bp, Corynebacterium glutamicum
  CDS (101)..(421): RXA01804
agtgggaccgcatggcagagttcgcagtcaactaaaatatgacctttgctggttggctaattttgggtcaaagttttgtgaaacgaagtaagcttaagttatgcatatcgtcaacattcgcttcaagcccaaggctaagtacgtggatacattccgctacacagtcgacaaattcactgagtcaaccaggacagaggaaggctgtctctactttgattggttccgcaacaccgattacccaggcgagtaccttgtaattggtgtgtggacggatgaaggtgcgacggaacataagaagagcgagcacttcttgcgagctcaagaaacacttccaccgttgctgcaacaaactccaatgattattcagagtgagttttccaagaagaagggttgggaacgtttcagcgatttcaccgtctactaaggagcccgcaaaagctttgt

SEQ ID NO: 2450 - protein, 107 aa, Corynebacterium glutamicum
MHIVNIRFKPKAKYVDTFRYTVDKFTESTRTEEGCLYFDWFRNTDYPGEYLVIGVWTDEGATEHKKSEHFLRAQETLPPLLQQTPMIIQSEFSKKKGWERFSDFTVY

SEQ ID NO: 2451 - DNA, 453 bp, Corynebacterium glutamicum
  CDS (101)..(430): RXA01805
ggcattgtcgagcgaactcatggtttaactcccttcatgaaatgtgtgcggggtcactggttcccagcctagtctgaactggctaaacaagatcggtacagtggtggtcgtgattttgattaatgtgaaattcaagccattgccagaatatgtagacaccttccgcgagcaggtagcggagtttacagaaaagacccgtgcggaagaaggaaacatcttcttcgattggtcaattaacaccgacaacccaaacgagttcatcctcatcgaagcattccaggacgacgctgccgaagctcacgtcaacagcgaccacttcaaggcggcctgtgagctgttcccaaccatcctgtctgagaccccagagatcatcaacacccttatcgagggcaagactgagtgggaccgcatggcagagttcgcagtcaactaaaatatgacctttgctggttg

SEQ ID NO: 2452 - protein, 110 aa, Corynebacterium glutamicum
VVVVILINVKFKPLPEYVDTFREQVAEFTEKTRAEEGNIFFDWSINTDNPNEFILIEAFQDDAAEAHVNSDHFKAACELFPTILSETPEIINTLIEGKTEWDRMAEFAVN

SEQ ID NO: 2453 - DNA, 603 bp, Corynebacterium glutamicum
  CDS (101)..(580): RXA01806
aatcaaaatcacgaccaccactgtaccgatcttgtttagccagttcagactaggctgggaaccagtgaccccgcacacatttcatgaagggagttaaaccatgagttcgctcgacaatgccccgctgctggaattggatgttcaggaatgggtaaaccacgaaggcttgagcaatgaggacctgcgcggcaaggttgtggtggtggaggtgtttcagatgctatgccctggatgcgtgaatcacggtgtccctcaggctcaaaaaatccaccgcatgattgatgaatcccaagtgcaagtcatcgggctgcacagcgtgtttgagcaccatgatgtgatgacacctgaggctttgaaagtgttcatcgatgagtttgggatcaagttccccgtggcagtggatatgccgagggaaggccagcggattccttcgacgatgaaaaagtatcgtttggaaggaacgcccagcatcattttggctgatcgaaaaggacggattcgtcaggtgcagttcgggcaggttgatgatttcgtgctgggattgctgctcggcagtttgctgtcagagacggacgaaacctaaagcgctttggtctgcaggcc

SEQ ID NO: 2454 - protein, 160 aa, Corynebacterium glutamicum
MSSLDNAPLLELDVQEWVNHEGLSNEDLRGKVVVVEVFQMLCPGCVNHGVPQAQKIHRMIDESQVQVIGLHSVFEHHDVMTPEALKVFIDEFGIKFPVAVDMPREGQRIPSTMKKYRLEGTPSIILADRKGRIRQVQFGQVDDFVLGLLLGSLLSETDET

SEQ ID NO: 2455 - DNA, 855 bp, Corynebacterium glutamicum
  CDS (101)..(832): RXA01816
ttgggtgtaacggcgtgggaaaataggaaatgccctcctgaacaggaagaatcaagcttagttagagtccttcttcccctgccagaaaggcacctcacaggtgcaattattacacacccccgcagccatatccatttccttcgacgaccccaacctcatctctaccgcagggctggtcccgaccatggccctggccgaggaccggttaacagtaccaaccgacaaaggtgctaacccaggtgccaaaatcacgaccctcattgcggggatggtcgccggtgccgactccatcgacgatatcgatgcactccgccacggcggtatgcaccgactctttgactggatctacgccccctccacgttggggtcgttcctccgggcctttaccttcgggcatgtccgccaactcgacgctgtggcctcccggttcctggtgggtctggcaacacaggccccggccctggtcccggttgatgcttctaccagtgattacgtcttcatcgatgttgatgacaccatcattaaggtccacggacatcagaaacaaggcgctggttttggttactccggtatccgtggactcaacgccctgctggccacagtgaccacaccagagtcagcaccagtggtcgtggcccaacgattacggaaaggatcgtgcggttccccgcggggtgcaggccggttgattgctgatgcggtggctaccacccggcgtttgccggggatggaggatgagaagatccttttacgcgcggattctgccttttatggccatcccagtatcagtgctgcgatcaaggcaggggcggatgtgtcttcacggtgcggatgacccccaatgtcaagaaagcg

SEQ ID NO: 2456 - protein, 244 aa, Corynebacterium glutamicum
VQLLHTPAAISISFDDPNLISTAGLVPTMALAEDRLTVPTDKGANPGAKITTLIAGMVAGADSIDDIDALRHGGMHRLFDWIYAPSTLGSFLRAFTFGHVRQLDAVASRFLVGLATQAPALVPVDASTSDYVFIDVDDTIIKVHGHQKQGAGFGYSGIRGLNALLATVTTPESAPVVVAQRLRKGSCGSPRGAGRLIADAVATTRRLPGMEDEKILLRADSAFYGHPSISAAIKAGADVSSRCG

SEQ ID NO: 2457 - DNA, 756 bp, Corynebacterium glutamicum
  CDS (101)..(733): RXA01817
aggatgagaagatccttttacgcgcggattctgccttttatggccatcccagtatcagtgctgcgatcaaggcaggggcggatgtgtcttcacggtgcggatgacccccaatgtcaagaaagcgatcgcccaggttcctgatgatgcgtggcagacaattaagtacaccaacgcgatcttcgacgaggacaccgggcgctggatctcggtggccgaggtcgccgagataccgttcaccgcatttacctcccggaagaaaaccgaccacatccccggactgctggtggtacgccggataccggagctgaataacaaggatgtggatcagccggggttgtttgatctacaccgcttccatgcggtgttcaccaccgccgacccaggcatcctcgatactgttgctgcggataaaacccaccgtcaacacgcaatcatcgaacaagtcaacgcggacgtaaaggccagtgcgttggcgcatatgccatcaggtgtattcaccgccaacagcgcctggttggtgtgtgcggtcatggcgttcaacctcacccgcacagccggtgtgatcgctgcaggcgcgatggccagggccaccaccgcaacgatccggcggaaacttgtggccgttccggccaggattgcacgcagcgcccggagattgattcttcacttgccacggaactggcggtgggaaacccagtggtcaagattgtgtgatcacggccgtttaccaccgtaaccggtagctccctgactacc

SEQ ID NO: 2458 - protein, 211 aa, Corynebacterium glutamicum
MTPNVKKAIAQVPDDAWQTIKYTNAIFDEDTGRWISVAEVAEIPFTAFTSRKKTDHIPGLLVVRRIPELNNKDVDQPGLFDLHRFHAVFTTADPGILDTVAADKTHRQHAIIEQVNADVKASALAHMPSGVFTANSAWLVCAVMAFNLTRTAGVIAAGAMARATTATIRRKLVAVPARIARSARRLILHLPRNWRWETQWSRLCDHGRLPP

SEQ ID NO: 2459 - DNA, 1497 bp, Corynebacterium glutamicum
  CDS (101)..(1474): RXA01820
aaatgccctcctgaactggaagaatcaagcttgcttagagtcctgattcacctgccagaaaggcacctcacaggtgcaattattacacaaccccacagcgatgtccgcatcctttgatgaccccaacctcatctcgcttgctggactggttccaaccatgcacttagccgatgctgccagcctgtccaccttggcccaggaccggttgagcatcaccggtgataaaggtgccaatgctggtgcgaagatcgcctccctagtcgcgggcatggtcgccggtgctgattccatcgatgacatggatgtactccgccacggaggtatgcgccgacttttcgaccggatctacgccccatccacattggggtcttttctgcgggccttcactttcggccacgtacgccaactcgatgctgtggcctcccgattcctggtcaacctggccaggcaggcaccacacctggtgccaccaccaccggcaggcagtggcggtaacgggtatgtgttcgttgatgttgatgacaccatcattgaagtccacggccacaccaaacaaggtgccggctttggttactccggtatccgtggactcaacgccttgctggccacggtcaccaccgcacagtccgcccccatcattgtgggccaacgattgcggaaaggatcgtgtggttccccacgaggggcccaccgcctgatcgccgatgcgatgaccaccaccaggcgcctgcccgggatggaggataagaaaatcctcgtccgggcagattcggcgtattatggtcatcccagtgtcagtgtggccctaaggtccggtgcggatgtgtccgtcacggtgcggatgaccccgaacgtcaagaaagcgatcgtcgcgatcccggaagatgcgtggcagacgattcagtacaccgatgcgatcttcgatgaggcatcacaatcgtggatctccttagcccaggtcgccgaagtgcctttcaccgcgtttacctcccggaagaaggccgaccatgttcccggacgcttggtggtacgccggattcctgagctgaataagaaggatgtgtatcagccgggcttgtttgatcttcaccgcttccatgcggtcttcaccaccgccgacccaggcgtgctggatactgttgctgcggataaaacccaccgtcagcacgcgatcattgaacaggtcaacgcagacttgaaggcaagcgcgttggcgcatctgccgtcggggacgttcaccgccaacagtgcctggctcgtatgcgcggtcatggcgtttaatctcacccgtgccaccggggttatcgctgcaggcgggatggccaaggccaccaccgcgacgatccggcggacactgatggccgttccagcccgggtcgcccgcaggtcccgccgactggtgctccaccttcccgaggggtggacgtggcaaccacagtggcagaaactgtttgatcacggccattcaccaccgtaaccggtagctccctgaccacc

SEQ ID NO: 2460 - protein, 458 aa, Corynebacterium glutamicum
MSASFDDPNLISLAGLVPTMHLADAASLSTLAQDRLSITGDKGANAGAKIASLVAGMVAGADSIDDMDVLRHGGMRRLFDRIYAPSTLGSFLRAFTFGHVRQLDAVASRFLVNLARQAPHLVPPPPAGSGGNGYVFVDVDDTIIEVHGHTKQGAGFGYSGIRGLNALLATVTTAQSAPIIVGQRLRKGSCGSPRGAHRLIADAMTTTRRLPGMEDKKILVRADSAYYGHPSVSVALRSGADVSVTVRMTPNVKKAIVAIPEDAWQTIQYTDAIFDEASQSWISLAQVAEVPFTAFTSRKKADHVPGRLVVRRIPELNKKDVYQPGLFDLHRFHAVFTTADPGVLDTVAADKTHRQHAIIEQVNADLKASALAHLPSGTFTANSAWLVCAVMAFNLTRATGVIAAGGMAKATTATIRRTLMAVPARVARRSRRLVLHLPEGWTWQPQWQKLFDHGHSPP

SEQ ID NO: 2461 - DNA, 1041 bp, Corynebacterium glutamicum
  CDS (101)..(1018): RXA01842
cacgtcatggtctcgcggtgatcatcttcctaccgtgacaggcaaggccgcaaacggccgtgaccacaggaaagaaattcacgaggagaggaagcacacgatgtcgaaggtatacgtgtccaacgagtacggcggcccggaaaaccaggaactgatcacccgcaacaccccccagccaggcccgggagaactcggggtcaaggtccacgcggccggggtcaacccgcttgattggaaggtccgttccggggttgccggaaccccgcgagagcttccggcacccctgggcgaggaggcctccgggatcgtcaccgccgttggagacggtgtggagggcttcgcggtcggcgatccggtgctcggcctggtggcccccggcgtcggcggatatgccgaggacaccctgctggtggcagagagtaccgtgctaaagccggaggagatctcgttcaccgacgccgccgcgatcccggtcgctggggcgagcgcctacgccggcactcaccaggtcgagcttgaaccaggccagtcgttgctgatcaatggggccggtggtggggtcgggctgatggccgcgcagatcggacgggtccacaagttccaggtcgtcggcgttgaccacgaggacaagcgcgagctcatcgaatccaccggtgctatcttcgtcgccaccggcgacgccgtcgcggagcaggtgcgtgcgctgctccctgacggtgtggacgtagtcttcgacctagtcggcggggaggcgttgcgggtggttgctcccttagcgaagaatccggcgcacgtgatctcggcggctgatgctgccaccgtgggagaactcggtggacaggtgctgcgccgcaccccggaaatggtcggacagatcaccggggtggtccagtacgggctggtcgacccgaaggtcgatacgacctacccgctggaacaggccggtaaggccctggcccacgttgagcagggccacgcccgcggcaagatcgtcctcgagctcatcacctcccaggactaaccagacaacgcggtgacctc

SEQ ID NO: 2462 - protein, 306 aa, Corynebacterium glutamicum
MSKVYVSNEYGGPENQELITRNTPQPGPGELGVKVHAAGVNPLDWKVRSGVAGTPRELPAPLGEEASGIVTAVGDGVEGFAVGDPVLGLVAPGVGGYAEDTLLVAESTVLKPEEISFTDAAAIPVAGASAYAGTHQVELEPGQSLLINGAGGGVGLMAAQIGRVHKFQVVGVDHEDKRELIESTGAIFVATGDAVAEQVRALLPDGVDVVFDLVGGEALRVVAPLAKNPAHVISAADAATVGELGGQVLRRTPEMVGQITGVVQYGLVDPKVDTTYPLEQAGKALAHVEQGHARGKIVLELITSQD

SEQ ID NO: 2463 - DNA, 303 bp, Corynebacterium glutamicum
  CDS (101)..(280): RXA01844
gaccaattggtcctgctgcatccgcatgatcgccaacgccagttgcgggtaggcgtccacgacctcggccagggcctcgacgggcaggtagagcgcgcaggtggtctcaatcgcccaggagttggagatcattgaggacggcacgggtgcggtgctcgtctcggagcaggcaaccaccttcgacaacgggttcatcggctactcctacttcaccaccggtacggacggagccacctgcatcaccgaccttcgcctcagggcctccccactgccgcaggtttaaccggtactagccggtttttc

SEQ ID NO: 2464 - protein, 60 aa, Corynebacterium glutamicum
VVSIAQELEIIEDGTGAVLVSEQATTFDNGFIGYSYFTTGTDGATCITDLRLRASPLPQV

SEQ ID NO: 2465 - DNA, 531 bp, Corynebacterium glutamicum
  CDS (101)..(508): RXA01845
ggctccgtccgtaccggtggtgaagtaggagtagccgatgaacccgttgtcgaaggtggttgcctgctccgagacgagcaccgcacccgtgccgtcctcaatgatctccaactcctgggcgattgagaccacctgcgcgctctacctgcccgtcgaggccctggccgaggtcgtggacgcctacccgcaactggcgttggcgatcatgcggatgcagcaggaccaattggtccggtcccgggaacgcgagaccgcacagaccacctcgactgtcgagcagcgcgtggccgccgccctccaacacctggacgccaagctcgggcaaatccgacaagacggatccagcctgctgcaggtccgcctgcgccgcgacgacgtggccggcaccaccgtcgagtccgcctcccgggcaatggcgcggatgaagaaaaccggtgtcatcgactccggccgcgaatggatcgccattaccaaccaccaggccctggccgacctggtcgccggcctctaaacgcccacatccctctctct

SEQ ID NO: 2466 - protein, 136 aa, Corynebacterium glutamicum
MISNSWAIETTCALYLPVEALAEVVDAYPQLALAIMRMQQDQLVRSRERETAQTTSTVEQRVAAALQHLDAKLGQIRQDGSSLLQVRLRRDDVAGTTVESASRAMARMKKTGVIDSGREWIAITNHQALADLVAGL

SEQ ID NO: 2467 - DNA, 669 bp, Corynebacterium glutamicum
  CDS (101)..(646): RXA01856
cactctccagcgttcgcgccagatatgcagccaactcttgatcgtggtgtggaagcgctggttgtagctgcttctgcgtggctagtaaaataattggctaatgaatccttttctttcggacacgttgattgtccagcagacctcttccttcctgtctaacaactttgagatctacaatccagacggcgaagttgttatcagaatcaaaactgaagggtcgttgggctctcggctggtcaagggcgaccgcagattcacactggaagacgccttcggcaccccattgatgcaggtgcgcgatcccatgaactttgttcgcgacacctatgaaattgatgatccaaatggcaatcccattgctcatgtgcggaagcgtttcaccttcttcaacaagcggatggacatcgaactaccaggtgaccgcgttattgaaatgcacggtaacttccttggatttgaatttgagttccgcatgggcgatcggattcctgcgaaagtaacccgaaaatggtccggcgctggcaacggatacctaggccgaagcacctacgcccttattttcgatgaagaagcccctgatgaaatcagaaaagtcatcattggaggcatggtcgcgctagatctgatccgggagaaggaacgtaattaagccacccccgtttcatgtct

SEQ ID NO: 2468 - protein, 182 aa, Corynebacterium glutamicum
MNPFLSDTLIVQQTSSFLSNNFEIYNPDGEVVIRIKTEGSLGSRLVKGDRRFTLEDAFGTPLMQVRDPMNFVRDTYEIDDPNGNPIAHVRKRFTFFNKRMDIELPGDRVIEMHGNFLGFEFEFRMGDRIPAKVTRKWSGAGNGYLGRSTYALIFDEEAPDEIRKVIIGGMVALDLIREKERN

SEQ ID NO: 2469 - DNA, 774 bp, Corynebacterium glutamicum
  CDS (101)..(751): RXA01857
ttaagggacttcgcagcctacttgagagattttgacagataactaataacctccacttggtcgtactaatctaacttaatctctccctaggagttctcccatggcttcacgccgtttccgtatgatgctcaccgcaagcatcaccgcagcttcccttggtttttccctcaccccagcaatcgccgatgaagctgtaaccgttgctacggcaccctccgtcggattcgattccggcgtcgaacgcgatgcaccattcaccgcagttccacacgacgtagttctcggcgttggagcgacccagtccgagctcattttcaactggatcaccgcgcagggcctaaccggccaggttgcacagatctccctggacgataccttcgcatccccaatcaccgttgatgcagtttctgaaaacgtcagcatcgtgaacaccgaaggcgattcccgcgaccgagctgaaggtgaatacgttgaataccgcgatggcgcagtcaaccgcgcaaccgtagatagcctcgcagaaaacaccacctactcctaccgcgtcggctccgaagctgacggctggtccgaagtgcaaaccttcaacaccggcacctacggtgacaactggaacttcctcttcttcggcgacacccagctgtacaacacccactccaaccgtgcagaagaagtccagaactgggcaaacaacctggaacggcggcccaccaatcgaaaacccaggaacctccttcatcctctccgcgggtgatcaggcaaaccactccagct

SEQ ID NO: 2470 - protein, 217 aa, Corynebacterium glutamicum
MASRRFRMMLTASITAASLGFSLTPAIADEAVTVATAPSVGFDSGVERDAPFTAVPHDVVLGVGATQSELIFNWITAQGLTGQVAQISLDDTFASPITVDAVSENVSIVNTEGDSRDRAEGEYVEYRDGAVNRATVDSLAENTTYSYRVGSEADGWSEVQTFNTGTYGDNWNFLFFGDTQLYNTHSNRAEEVQNWANNLERRPTNRKPRNLLHPLRG

SEQ ID NO: 2471 - DNA, 673 bp, Corynebacterium glutamicum
  CDS (101)..(673): RXA01858
cgtgtgtttgttttgactggaacagcgtcggcttttcggccacgcggcctgcggacagtagcggaatcacgcgggacattgatccccggacgtaaagccgatgtttatgacaccgcgggcgttgaccgaagataatgagttgaccctggctttgaaatcactcggagggcttatggtgtcacccaatgagtgctcagtagtgacagaagtgatgccgacttggagagaattatggcatcaaaggcttcgatggcaacgcggtgcgctggaaaacctcggtgcttatggcatcacaccacaaacgacacggtattggttccagcagctgggaatcggttacggcgcattagccttggtcgcctatttcgcagtcattatcattacgtttctcgcccgcgatcaatggatctggtatccattctggatgctgctgggactgttgttcatgattgaacgcgtgctaacggtgtggagatccacatggtttgccaggtttgttgctgcgttattaatcccagagctcatctacgccagctatctcaacctggtatttctcaaaggcgttgtggatattctattggccaagcaagctcactggggtgagcatggtgacaagacaatgcaggtagccgatgcagctgccgaaattaacgatgaaggggaggaacgccga

SEQ ID NO: 2472 - protein, 191 aa, Corynebacterium glutamicum
MFMTPRALTEDNELTLALKSLGGLMVSPNECSVVTEVMPTWRELWHQRLRWQRGALENLGAYGITPQTTRYWFQQLGIGYGALALVAYFAVIIITFLARDQWIWYPFWMLLGLLFMIERVLTVWRSTWFARFVAALLIPELIYASYLNLVFLKGVVDILLAKQAHWGEHGDKTMQVADAAAEINDEGEERR

SEQ ID NO: 2473 - DNA, 798 bp, Corynebacterium glutamicum
  CDS (101)..(775): RXA01870
ggatcatgtccaccccagaaggtagcctgtcagtgtgagcgtaatcgagggcaagtaccagctgaaacctcaaggccgaggtggcctgtggtggtcaatcgtgggtgtggcagttgttttgttgctgcttccaacgttgatcaacctggtggttccggataaagccaatgactacaagcagctagaaatcgatcttctgggtgtggattggtcagtgccaatcaccacggaggaatccgctgcggtgctgtgtgaggaaacatctgatgaaatcacacagaagtattgggactgcaacggggacaccacggtggtgaccatgatcgtcgagggcgtgaaagatccgtccaatacgttgcgtcgcatggtgggttcatcgctgataaccagtgtggatgacagcctagaggcagtatctagcgaagatggccgtgcgcatgcgttgtatgtgccaggtcagcaagaaggatctttgtggacgctgcctatcgtggcactgagcgtgcagggttcgggtgattatgaagacctcacagcgatcgcaattatcaacggcacctcgttggattattacagcacccacatttggtccagcatggccgctgaccgcgggttgccgtaccagcaggacttccccctgatgctggaagaggagccatggcaagacacccccggcggggatcgtcccttcgagctgcccaatgatttctttgatcagtaccccgatctttttggcccaggctccgtcattcccaaccttgaaggagaatccctatgagtcgcatgtttagcatcacc

SEQ ID NO: 2474 - protein, 225 aa, Corynebacterium glutamicum
VGVAVVLLLLPTLINLVVPDKANDYKQLEIDLLGVDWSVPITTEESAAVLCEETSDEITQKYWDCNGDTTVVTMIVEGVKDPSNTLRRMVGSSLITSVDDSLEAVSSEDGRAHALYVPGQQEGSLWTLPIVALSVQGSGDYEDLTAIAIINGTSLDYYSTHIWSSMAADRGLPYQQDFPLMLEEEPWQDTPGGDRPFELPNDFFDQYPDLFGPGSVIPNLEGESL

SEQ ID NO: 2475 - DNA, 1086 bp, Corynebacterium glutamicum
  CDS (101)..(1063): RXA01871
gcggggatcgtcccttcgagctgcccaatgatttctttgatcagtaccccgatctttttggcccaggctccgtcattcccaaccttgaaggagaatccctatgagtcgcatgtttagcatcaccttgtgggttgccatcctcctctcaaccccggcgctgtttttgagcttggccacgttcatcttcgtggatggcatctctgtcctcgtgaatatagtgttcgcggtgctctacttggtagtcattgttttcctgttaagtcgcaccccgctgtggccacgttttaaaggctccggcagcaagaagggaggcggattcgcgtgggcggcgtcatcattgttgtggggcgcgttcgttggtttcggcatcgtcatgttgtttgccggtccggtcatggatctcacggacaaactcggctgggatttcgttgccatgagtttcaccggagcgtatccagaagaaatcgccaaagcgttaggcgttgccatcatcttgttgagcttccgccaactcaaccgtccgtggcatggatttatcaccggcgcgctagtgggcttaggttttgaggtcaacgaaaacctcctctatggcgccaccggtgcaatcatggaccccaacgctgacctcgacggcgtccttatgatgtggcaataccgcaccatgttgggcccactcatccatacgttgctcaccggattcgcaggttacggcatcgcgttggcattcttccgcgcacgaaaaacagtcgcctggcgctggggcgtggcgatcggttggactctcatcgccttcgcactgcatttttcatggaacctgatgtgggaaaacgtaatcggttcctatgtcaccatcatcgtggtcagcgttgtcatgtacggtctggctatctacatcctctggagtaattgggccgaagcccgcaacgactccagctacgctttcgtcccgggaatcatcacaaacaccaaagatttatcgcttcttgacgcccccattccagtaggcgctgaggttcccgagtcgcgcattccccaacagatagaggaacccaaggcggagaactagctttcactcgctctccatcc

SEQ ID NO: 2476 - protein, 321 aa, Corynebacterium glutamicum
MSRMFSITLWVAILLSTPALFLSLATFIFVDGISVLVNIVFAVLYLVVIVFLLSRTPLWPRFKGSGSKKGGGFAWAASSLLWGAFVGFGIVMLFAGPVMDLTDKLGWDFVAMSFTGAYPEEIAKALGVAIILLSFRQLNRPWHGFITGALVGLGFEVNENLLYGATGAIMDPNADLDGVLMMWQYRTMLGPLIHTLLTGFAGYGIALAFFRARKTVAWRWGVAIGWTLIAFALHFSWNLMWENVIGSYVTIIVVSVVMYGLAIYILWSNWAEARNDSSYAFVPGIITNTKDLSLLDAPIPVGAEVPESRIPQQIEEPKAEN

SEQ ID NO: 2477 - DNA, 302 bp, Corynebacterium glutamicum
  CDS (1)..(279): RXA01903
gctcaccttgatgaccgtggcatctatatcatcccagctcaatatccttggggatacgaggaaatcattaacctaccggcacgcgctacctctacacctgctgttgctcctcgcactgaggctgctccagctacagtatctgatgctgaggtccagagcctgcttgagtacttgcgtactaatgctttcgtaagtcgtcacgacggcgacaccacgaaggccgacatcttcaacaagcacgcggatactgtcaacaagcttgcagcactacgtgcaccctaaacccacaccgcataaccccc

SEQ ID NO: 2478 - protein, 93 aa, Corynebacterium glutamicum
AHLDDRGIYIIPAQYPWGYEEIINLPARATSTPAVAPRTEAAPATVSDAEVQSLLEYLRTNAFVSRHDGDTTKADIFNKHADTVNKLAALRAP

SEQ ID NO: 2479 - DNA, 546 bp, Corynebacterium glutamicum
  CDS (101)..(523): RXA01904
attagtttttattcgcaagggtggtctaaattttttactactgcgtcgtgtccaccggatacacttgaggtaatacagttacgaggctaaggagtatgtaatgagcatttcgccgaagaattccggtacaccaaacgagaacgccgcagcagcgcaggtggcagcaaatctggctaatttaacgtcgcaggctacagggtccatggacgaaactaatgagcaagtcattaaaagtaacgagcatggctctgatgcttatttggcggatattaaagccagtcgagagatgtgggcaaaaattgcgctcgatccgaatcaatctgaagaaactaggaaagaagctcgggagaatatggcgcggatagatgagtacgctcgtgagcacgataaagacaacaagggtttgttgcagaagttagcgaaaaacaaagcagagctcatcgggactgttgcggttgcaaccttaggtgtagtggcagccattgctaacaatggcaagataccgatgattcagttgaaaaaataacccccgcacaggctggacat

SEQ ID NO: 2480 - protein, 141 aa, Corynebacterium glutamicum
MSISPKNSGTPNENAAAAQVAANLANLTSQATGSMDETNEQVIKSNEHGSDAYLADIKASREMWAKIALDPNQSEETRKEARENMARIDEYAREHDKDNKGLLQKLAKNKAELIGTVAVATLGVVAAIANNGKIPMIQLKK

SEQ ID NO: 2481 - DNA, 654 bp, Corynebacterium glutamicum
  CDS (101)..(631): RXA01905
aaatgaaagtcacaaactttgttggggtttctttaaagtaaaatacagaagtttctctggcaaaaaacctcactactttctacagaaaggcgtcttcctcatgaaggcttctcagaccctcacccgcaacactcgtgcacgcaagctcggcatgggtattctcgcagcaactattatggctaccggtgcacttgctggcactgctccacaggcgacagcagcagtagataccactgcgccatacgtgtcctatgtcgttgacattcctggcaaggttggtgaaccaatcaagcctcagtacctcaccatctccgatcagtccgcctacaccgtgaccttcaagtacatgccatcctggttgaagtacgacgcaaacaagaagatgctgtacggtaccccaaccgaggttgatgtctggactcctgaggtacatgttgttgatgctcatggcaacaagactgtccgttacttcaccgttgtagcagtcccagcaaacactggaccaaccaccaccacgccatctacttcaaagccatctaccccgcaggtgaccaccccaactactccgaaggcgcctaccttgccaaagtccaccttcgactggaccttgtggggctccatctttggtttctagttctcactagcacctcaaaa

SEQ ID NO: 2482 - protein, 177 aa, Corynebacterium glutamicum
MKASQTLTRNTRARKLGMGILAATIMATGALAGTAPQATAAVDTTAPYVSYVVDIPGKVGEPIKPQYLTISDQSAYTVTFKYMPSWLKYDANKKMLYGTPTEVDVWTPEVHVVDAHGNKTVRYFTVVAVPANTGPTTTTPSTSKPSTPQVTTPTTPKAPTLPKSTFDWTLWGSIFGF

SEQ ID NO: 2483 - DNA, 588 bp, Corynebacterium glutamicum
  CDS (101)..(565): RXA01906
gcgttcgggtaaacccgtgacaatcgcacggggcttgtttacctgacactcaagccccgtgcaccacaacaacccaccttaaagaaaggtttttccacccatgtccgaattccctacacctacgacttttcacgtcgaaccagaaacgcttagctccgccaccgatctcactgttgatgcacataaaatcgcagaactgctgctcagcaccactgattaccgtgtgttctacatgccgcgtctcgccggtgtgactcctatcgtgtcctacctctatgtctacgatggtgaaaacttcctcattgttggtcgctccactcatgtgccgtgggagtactacgttcactaccccatcaagccatcacgtgaatttggctctgctattgctgtgcctctcgatgattctgatgacccttatgatgcagcagaagttgttgctctagtaaagcagtacatgacgcccacgctcactcctggtgagggttatatgcagggcttttacaagggtctcaccttcaccaaccacctcgatatacatcgaccactgacccagattatctcagactaacagctatattcacccaccta

SEQ ID NO: 2484 - protein, 155 aa, Corynebacterium glutamicum
MSEFPTPTTFHVEPETLSSATDLTVDAHKIAELLLSTTDYRVFYMPRLAGVTPIVSYLYVYDGENFLIVGRSTHVPWEYYVHYPIKPSREFGSAIAVPLDDSDDPYDAAEVVALVKQYMTPTLTPGEGYMQGFYKGLTFTNHLDIHRPLTQIISD

SEQ ID NO: 2485 - DNA, 735 bp, Corynebacterium glutamicum
  CDS (101)..(712): RXA01907
ttcgttttacccacaccagcacgtcaccctcttgcatcacgccgagagggtgacgtgcttttttcctacttttcctcataactacagaagggacgccctcatgtctgcttttgatgaactccgcaagaactaccgctacaagttcactgacacctggccggccaacgctgttaccggcaccggctactacgccaacccagcttttatcatcatctccgctgatgccatgacgcagaacacccatgccgattccaatctcatcacggttaaagagcaccttaacaccctgtttccgtacagcgtacaacgcaaggatcgtgcctttgtctctgagatctacacccctattaacctgctcgaagataatccagaactagctcaagaaatactcgatgtgctcgacaccctgagcaacaacgctgtttttaacgatgcgcactacagcgagcttgaactagagcgcctcaatgaatatgtcatcgacaccttggcctatgacatgaagtccgacatgatgcgcgccctcgttaaggcccgaccagaggccgatcttgaggcgatggaagaactcgacattgccaatatccagagctggattaatctccactcctccactgtgagcgaacacaacgatggcagcgttgatgatgcaccgtttaattctctcgcattagctgagatttatttgcaacagcttgcagaccacactgtctaagcacgctgtgtaactaccac

SEQ ID NO: 2486 - protein, 204 aa, Corynebacterium glutamicum
MSAFDELRKNYRYKFTDTWPANAVTGTGYYANPAFIIISADAMTQNTHADSNLITVKEHLNTLFPYSVQRKDRAFVSEIYTPINLLEDNPELAQEILDVLDTLSNNAVFNDAHYSELELERLNEYVIDTLAYDMKSDMMRALVKARPEADLEAMEELDIANIQSWINLHSSTVSEHNDGSVDDAPFNSLALAEIYLQQLADHTV

SEQ ID NO: 2487 - DNA, 529 bp, Corynebacterium glutamicum
  CDS (101)..(529): RXA01923
ccaaagtgaataccccgactgcagcagcgcaaaagttcaagtactttgggatgcaaatctagtagcacgtcccatgtttctcacactctcaggagctgacatgtctgcacttattaaaggttcaggacctcatcatgtggttgtcttaaatggttggtttggtcatgctgcgggctggggagctttcgctgactatcttgacctcggcaactacacctggcacttttgggattaccgaggttacggcaacagaaaagacgacgcaggagaatttactctggaggaaatttcagcggatatcgttgcatacatcgactcgattgaggcagaaaaggtttccatcctgggccattccatgggtggagtgttcatgcagaaagtccttgcagacagcgccacccccatcgcttcactggttggaatttctgccgttgctgcagctggaacaccattcgatgaggattctcggaagcttttcacctcagcagggcacaacccggactcgaggcgagccatcatcgatttcacc

SEQ ID NO: 2488 - protein, 143 aa, Corynebacterium glutamicum
MSALIKGSGPHHVVVLNGWFGHAAGWGAFADYLDLGNYTWHFWDYRGYGNRKDDAGEFTLEEISADIVAYIDSIEAEKVSILGHSMGGVFMQKVLADSATPIASLVGISAVAAAGTPFDEDSRKLFTSAGHNPDSRRAIIDFT

SEQ ID NO: 2489 - DNA, 777 bp, Corynebacterium glutamicum
  CDS (101)..(754): RXA01931
tcgataggcatggcgccgattctaggtcgaactgatctaaagtcccaccacgcaaaagtaaccaaggcgtacatctacccggcactttaagatcagtggcatgagcacttcttttgagtccattcccggagttactatctccgctcgaaaagccttgagcactgcggggtttaaagatctggaatcgcttgcaggtaccaattacgaagaagtggctggtctgtcaggaattggcgcacgtactttggagcgattgcaagcagcgctggtggagaagagaatgagctttggcggtaaagtgccagaggcagaacagcgcaccgcgacgtggacaacgctagattctgcagcaccagaggcaacagaaacctcagaatccccagagtacttcattcaaaacctagacattcctcgcagaattacccacggccggttgttgttggaaattttcaacagagcgacaggccagaaaccttatgtagcagggtcttcgattgttggttatgggcgagttcattatcgctatgccacgggtagggaagggatcactattcgtgtgggtttcagtccgcgaaaggcaaagatttcactttatggactaaccagtgcgcctgcgtctcgagaacttctgaagaaattgggtaagcattctgttggtgtgtcctgcctatatatcaacaaaccagaggatgttgatcttgaggtgcttgaggaaatgatccgtatttcttgggaagcggaacctggcgaatgttaaatctcaacctttaacaaagt

SEQ ID NO: 2490 - protein, 218 aa, Corynebacterium glutamicum
MSTSFESIPGVTISARKALSTAGFKDLESLAGTNYEEVAGLSGIGARTLERLQAALVEKRMSFGGKVPEAEQRTATWTTLDSAAPEATETSESPEYFIQNLDIPRRITHGRLLLEIFNRATGQKPYVAGSSIVGYGRVHYRYATGREGITIRVGFSPRKAKISLYGLTSAPASRELLKKLGKHSVGVSCLYINKPEDVDLEVLEEMIRISWEAEPGEC

SEQ ID NO: 2491 - DNA, 558 bp, Corynebacterium glutamicum
  CDS (101)..(535): RXA01941
ccggacttgccgctggtttagtcactttttgctcacgacggtatttattggtcgatttcaccagcgcagcgttgaaaaacgttgggcgccagtcacccacatggccttgacttcacttttgcaccagcttgcagataaaaaacacagtgacctcagccgggaagacatcgtaccgcgggcctttactgtcccgacctctactgacgcccacgctattcatcaagacttggaaaaactccgaaactccgtactcaaagagcaaaatcacctaaccactgtgttgggaacttggtcagaattcctcacctccaacagcgataactccgacattttgcgttcctccgctgaacttgggctccaattggagcaggtccgcgataaagcactcgaagtggaacagcgtatcaaagcctctgctcaggtggatcttacggacctggctcatgagattgagatctgcaatcaacaccacgcaaccctcatcagtgcgattcaggtaagactgcaatcgcatactgctgagcttcgggctgggtgatttcttaagactgacctagt

SEQ ID NO: 2492 - protein, 145 aa, Corynebacterium glutamicum
MALTSLLHQLADKKHSDLSREDIVPRAFTVPTSTDAHAIHQDLEKLRNSVLKEQNHLTTVLGTWSEFLTSNSDNSDILRSSAELGLQLEQVRDKALEVEQRIKASAQVDLTDLAHEIEICNQHHATLISAIQVRLQSHTAELRAG

SEQ ID NO: 2493 - DNA, 723 bp, Corynebacterium glutamicum
  CDS (101)..(700): RXA01942
gccgcgaaattcggtgaaattgaaggtattcctgcagatcaggcaaattcttccacgactgtgatcaaggtcaacggcaagaacgagtaacctgggatccatgttgcgcattggactaacaggagggatcggcagcggtaaatctaccgttgccgatcttttgtcatctgaaggatttctcatcgtcgacgcggaccaagttgcccgcgatatcgtcgaacccggacaaccggcattagcagagctagctgaagcttttggccaagacatcttaaaacccgacggcactctagaccgcgcgggattagcagccaaagcatttgtcagcgaagaacaaacagcgctgctcaatgccattacccaccctcgtatcgccgaagagtcagctcgtcgattcaacgaagccgaagatcaaggcgccaaagttgcggtttatgacatgcctttgcttgtagaaaaaggccttgaccgcaagatggaccttgtcgtcgtagttgatgttgacgtagaggaacgcgtccgcagacttgtggaaaaacgtggcctcacagaggacgacgtgcggcgtcgaatcgcttctcaagtgcccgacgacgtcagacttaaagccgctgacatcgttgtggacaataacggcacgctagaggaccttcatgctgaagcaagcaagctgattgctgagattcttagtcgcgtgaattagcactaaaacatcgtcaaagt

SEQ ID NO: 2494 - protein, 200 aa, Corynebacterium glutamicum
MLRIGLTGGIGSGKSTVADLLSSEGFLIVDADQVARDIVEPGQPALAELAEAFGQDILKPDGTLDRAGLAAKAFVSEEQTALLNAITHPRIAEESARRFNEAEDQGAKVAVYDMPLLVEKGLDRKMDLVVVVDVDVEERVRRLVEKRGLTEDDVRRRIASQVPDDVRLKAADIVVDNNGTLEDLHAEASKLIAEILSRVN

SEQ ID NO: 2495 - DNA, 585 bp, Corynebacterium glutamicum
  CDS (101)..(562): RXA01957
acctcaactccacagagcgttgttatcagatgctgatatggctcgccttgcagcacaactgaccgacaaacactaaaacctccacaacaaggacatcatcatgactactcgcaccgtatctacttctgcaccccatgtcactgtcaacatcaataccgcgcacaacaaaacacgcactgttaccaatggcgccagaaaaactaatgcagagcgtggcaagagctgcatctcatttcgtgtagggccagaattgtttgatgaattcaaagcgacctgcatcgacaacgatatttccatgaccaaggcgtttgagaaagagcttcgcacctgggttgatgagcacaacgctggtgcaacaaagaaaagaaacacccatcgcacctacgtacaagcacccgttggtactgtcgccaccagctctattccaggtcttgggttatttactgtgttcaagaagagctctgatcagatgtggtacgacctggaaagcagcccgctgatcgcacaagagcccatgtcgaatatggacatgcatcgtaacggctcttttgagctgcacctgtagatctctctctcgaccacaca

SEQ ID NO: 2496 - protein, 154 aa, Corynebacterium glutamicum
MTTRTVSTSAPHVTVNINTAHNKTRTVTNGARKTNAERGKSCISFRVGPELFDEFKATCIDNDISMTKAFEKELRTWVDEHNAGATKKRNTHRTYVQAPVGTVATSSIPGLGLFTVFKKSSDQMWYDLESSPLIAQEPMSNMDMHRNGSFELHL

SEQ ID NO: 2497 - DNA, 630 bp, Corynebacterium glutamicum
  CDS (101)..(607): RXA01958
atatggacatgcatcgtaacggctcttttgagctgcacctgtagatctctctctcgaccacacacagctctcaccacctcctagaaaggacggtttcaccatgtctaaaaaacgcgaccacctcaccgtcattcctgaccttgagtcacgcacccatcacagccgcagtacacaaccgccaactacgctgcccgcaccacagctgactattatcaccgcaccagacaagcatcaaccacagcttcgggttgttaaaaacaccaccaccccatcttctgtgcagccctcgccgatcaactacagctttactgatcctgtacttcgcgaggctcactatgcattccagcacagcgaacttgccaggccaacagtcctggactcacactgggttcgtcgcgcacaagaagaattcgacactgagcataatgctgcctatgtccgtgccgctgaccagctcttatccccttttgatgcctacatcctcgacaacggcgatgtttacaccaagaccccacgtgccatcagtgctgctgaacaagaagaaatacttgagcacttgcacgaacaccatatctgctgggacgaagaagctgaattcctgctgcgctaaaggttgccactggtttcagg

SEQ ID NO: 2498 - protein, 169 aa, Corynebacterium glutamicum
MSKKRDHLTVIPDLESRTHHSRSTQPPTTLPAPQLTIITAPDKHQPQLRVVKNTTTPSSVQPSPINYSFTDPVLREAHYAFQHSELARPTVLDSHWVRRAQEEFDTEHNAAYVRAADQLLSPFDAYILDNGDVYTKTPRAISAAEQEEILEHLHEHHICWDEEAEFLLR

SEQ ID NO: 2499 - DNA, 481 bp, Corynebacterium glutamicum
  CDS (101)..(481): RXA01959
cccaactactatgcacagcccgtaaccatcgagccggctaaaatctatcaacagaaaaaccactgcctatttgaccattcttgtgcaagaaagtacacctatgccccacgacgtttacgatgtcgaacacatcatttccaagcaacctttctgctccatctttttccagctccccgctgcagcgctgaaacctactattcaaaaagctgccaccaaccgcgaccttactaagctcaacaccgaacagatcgctgagaacctacagcgctacctcgacacctacagtgtcatgtctcaccagcgtgtcaccattgaagaggtcactcatgtgcgcaaccctcatgagcctgattatgagttttcaccacagtacggtgcacatatctcgctcatcggtgagtcttatgctgtgaacacggccaccaacgagccttatgccaccgactccgagggccatcctctcgcactgtattttgaaatg

SEQ ID NO: 2500 - protein, 127 aa, Corynebacterium glutamicum
MPHDVYDVEHIISKQPFCSIFFQLPAAALKPTIQKAATNRDLTKLNTEQIAENLQRYLDTYSVMSHQRVTIEEVTHVRNPHEPDYEFSPQYGAHISLIGESYAVNTATNEPYATDSEGHPLALYFEM

SEQ ID NO: 2501 - DNA, 603 bp, Corynebacterium glutamicum
  CDS (101)..(580): RXA01961
aacacccagctagtgcctgtgcttgagctaccaaagttcaatccttttgaggcacttgctatccaccttgaagccgccaacaactaagaaagcatccttcatgactgacaacgctgacaacaccacagataacgtaaccaataactcagacaccaatctcgattacagcttcgacccgctccctgacgagccctatgcctacggctttgaactggtcgctgctgatgcacactctgactcaacaacaaccagcaccgataccccagagactgtcgctgtggcacttaaaacccgcgaggacactatcaactgggtcaacacccagcgtgccgaaggtaaacccgatgaaattcgtatcaataacccaattcgatcagagcgtattgctgagtttgtccacgaaatgatcatgcatcacggcctcgtagcctgcatggaagatctcgcaatacttatcaagcgcgacaagctcacccagctggaagccgaaaacgctatcacagcctggcacaacctcaccaaagaatcccttggtcagatcatggggctcttctatcagtacgtcgaaaacaacacaaaataggaaagaagaaacaccatcat

SEQ ID NO: 2502 - protein, 160 aa, Corynebacterium glutamicum
MTDNADNTTDNVTNNSDTNLDYSFDPLPDEPYAYGFELVAADAHSDSTTTSTDTPETVAVALKTREDTINWVNTQRAEGKPDEIRINNPIRSERIAEFVHEMIMHHGLVACMEDLAILIKRDKLTQLEAENAITAWHNLTKESLGQIMGLFYQYVENNTK

SEQ ID NO: 2503 - DNA, 693 bp, Corynebacterium glutamicum
  CDS (101)..(670): RXA01962
agcctggcacaacctcaccaaagaatcccttggtcagatcatggggctcttctatcagtacgtcgaaaacaacacaaaataggaaagaagaaacaccatcatgtctgacaacactcaggacaaccctttctccatccgctacgcacaccctgaccaccagctcgctcttaatgagcttgttgatactgccgatctacctgcaccaacaagctatatgaaaaatccctggtccggggacaacacgcctatcgccgagtggcgacgcgagcgcatcacccagtggcagcgcaccgagatcattgtcaatcaacgcgatgatgacgatctcattcacgtcagcttcccgaagctcggccagcacattcagctcaacaccgacgatattctcgcattggtcgcagcctgcgtcacacccactgctaacgacattgaggcaactatcgaagaaaatctccactcatatccgcacgatacggtcatcatgtttaacgcagatgatctagatgatgcccttggtctcgttgttgccgtcaaagacgcgagcggggaacactcaccgcgcgctgtctggcgcaccaacaccgatcatggagctcttgacgagactgaactcgcgcggctcattctcaaattcggtggcagcttcgatgactacggcgtgctgcaacattaaaccgactcactaagcaccgc

SEQ ID NO: 2504 - protein, 190 aa, Corynebacterium glutamicum
MSDNTQDNPFSIRYAHPDHQLALNELVDTADLPAPTSYMKNPWSGDNTPIAEWRRERITQWQRTEIIVNQRDDDDLIHVSFPKLGQHIQLNTDDILALVAACVTPTANDIEATIEENLHSYPHDTVIMFNADDLDDALGLVVAVKDASGEHSPRAVWRTNTDHGALDETELARLILKFGGSFDDYGVLQH

SEQ ID NO: 2505 - DNA, 784 bp, Corynebacterium glutamicum
  CDS (101)..(784): RXA01963
cagattttctctgtgtgagctggggttttctgcatttcccacttgtttttctccaacactccacacacacaccttcaaagaagaaagttcgaaagattctatgaaaaaccgtaaaaaaatcatgtctaccctcaccactgtctgcgccgtactgggtatagttgcagctcatccattccacgcctctgctgtcatcggcggctctgtcccatcaactgattccgttgccaacgctgtcgcaaaaatcggaccaggcgcattgaactgcagcggtgtcatgatctcaccatcgtgggcactcaccgcacgccactgtgtcgatgacatcaacatactcggcgacatcgacaccatcacgcctattactccaggtattcatcgcaatgaaggtaactatatgggtgaggtttaccgcgcaccgtccggtgatctagcgctcattaatatcaacggcgtgcacaagggcaccattgcgcagctccccacacaagaatatccactgggaaccgctgcacagtcagtcggttttggtggcggtggtgtcaatatccgcaccgctgaatcggtcaacatgattctcaccgacatatatagcgtgaggtcagggaaattccatcacggtgtcggtcgatcacactatctcctctttgattatgacagtgctgaaactggtcgaatccacaaaggtgattctgggggccccatcttcattggtgacgaggttgtgggcattatgtctcacggcacaataaataagaacgacgggtcttttgatgacgaatcc

SEQ ID NO: 2506 - protein, 228 aa, Corynebacterium glutamicum
MKNRKKIMSTLTTVCAVLGIVAAHPFHASAVIGGSVPSTDSVANAVAKIGPGALNCSGVMISPSWALTARHCVDDINILGDIDTITPITPGIHRNEGNYMGEVYRAPSGDLALININGVHKGTIAQLPTQEYPLGTAAQSVGFGGGGVNIRTAESVNMILTDIYSVRSGKFHHGVGRSHYLLFDYDSAETGRIHKGDSGGPIFIGDEVVGIMSHGTINKNDGSFDDES

SEQ ID NO: 2507 - DNA, 1426 bp, Corynebacterium glutamicum
  CDS (101)..(1426): RXA01964
agagccagatgatggctttgatatggatgatgtcatgggccaagcgttcggtcgctagctcataccttgttacaacgacactttttaagggaagaagattatgaccagcgctgtgaatgtgcagaagaagaccacacagaaagtacttaagcccattaatacgaagaattactctgcgacagatgcagtacagacaggccagcacggatctgctttaggctcgaatatcggtgtctacacctataccgctggactcgatattggaaacggttatgtcaagggcattatcgaggcaaccggtgatacgactggcacgtctgttgatgttattgatatgccctctgcagcaacgcgcatgagccggccaacggaagttcccgaaccagatgacaccgctgttgctgtcaccggtgcggatttcttcaaccacattgataccaatttcaattcgcctatggtgaaaggtaattatcgttacctttgtggcacgcgcagcttgtctgcacgaggtagcttggaggaatttgatctggtgggtaaccgctccaaggcggaacaagaactgagcaaggtgctggtcatggcagtacttgcggccaaggctgtgaaagactttgtggcagcacatggtcgaatcccacaggttgctgttgagggtgatcccggtgtgctgcgtgtgcatacgtatcttgcacttgcgttaccgattaatgaatatgtgggtcaccgtcatgggtataaggcacagtttatgggtgatggggcagcgaacccggctgtgcatgtggtgacggttaacaactttgaaaccccagcaacggtgcagctcatctttgagcgtgtcgaggtcattgccgagggcgcatcggcacagtatgccattaccgcaggtggcgaagtacttatgaacggaatgctcgccgatgtacgctccaaagggcttgctctagagggcgtgacagcaggtgatgtgctacaagctcgccacacaatcggtgtggatgtgggtgaaggtactgtgaatttcccagtctttacggatgggcggtttaatcatgatgcttcacgcgcctatgacaagggttatggcaccgtcttggagtcggcgattcaggctatggacgatgctgggttggcacacaactttaactcgcgtaagcagttggctgattatttgcagcgaccaccgagtgcactcaagcggaatttctatacccgcgtggaacagcatgttgatcaggaggcagtgttctttgttcaggatgtggctgcagagttcgcacgagtgttgagcgacgtgggtgctcttaccgaagtagcctttgtctacggcggtggttccggcccgctgcgtgatcgactgcatgaagcgttgctgattaaggcagcggagatgggttcggaagatacgttcccggtgctgtat

SEQ ID NO: 2508 - protein, 442 aa, Corynebacterium glutamicum
MTSAVNVQKKTTQKVLKPINTKNYSATDAVQTGQHGSALGSNIGVYTYTAGLDIGNGYVKGIIEATGDTTGTSVDVIDMPSAATRMSRPTEVPEPDDTAVAVTGADFFNHIDTNFNSPMVKGNYRYLCGTRSLSARGSLEEFDLVGNRSKAEQELSKVLVMAVLAAKAVKDFVAAHGRIPQVAVEGDPGVLRVHTYLALALPINEYVGHRHGYKAQFMGDGAANPAVHVVTVNNFETPATVQLIFERVEVIAEGASAQYAITAGGEVLMNGMLADVRSKGLALEGVTAGDVLQARHTIGVDVGEGTVNFPVFTDGRFNHDASRAYDKGYGTVLESAIQAMDDAGLAHNFNSRKQLADYLQRPPSALKRNFYTRVEQHVDQEAVFFVQDVAAEFARVLSDVGALTEVAFVYGGGSGPLRDRLHEALLIKAAEMGSEDTFPVLY

SEQ ID NO: 2509 - DNA, 684 bp, Corynebacterium glutamicum
  CDS (101)..(661): RXA01965
acttctatgttactattaaattagtcaataacgttagtcataaacaatgcagttattgaagagaaacttcccgacacaatgtacgaaatgggggtcacacatggctcaaaaacaggacacgacacatgtatcagaggacgatgccccgtggcgtaatgtgcgtatgcgcttcccagaaacagacgctatcgttgagcggtttttggaaacacagggtgctcgtggcatctcgcttgcgatgcgacagctgatctatttgtttgtcgctgaatacggtgatgtagaggttgctaccgttattggcctcaagctggtggaaagcctgcaggcaggggctgagggtagtgatctttttgctcagctcgcggccggggttgctgacgtagacgctgtgactacacgcaagaaggcaccgcagcagatagcaccgccatcgaccacaacccgtgcacctgatcaggtaaatgagtttgttgccgaggcggagagtcagccggttgaggagtcagttgttgaggccaaagtacccaagcagcaggtagcaccacagccggcacagaagccggagcaaaaaccagaacaaaagtcggcgcaaccagcacagtcagagccagatgatggctttgatatggatgatgtcatgggccaagcgttcggtcgctagctcataccttgttacaacga

SEQ ID NO: 2510 - protein, 187 aa, Corynebacterium glutamicum
MAQKQDTTHVSEDDAPWRNVRMRFPETDAIVERFLETQGARGISLAMRQLIYLFVAEYGDVEVATVIGLKLVESLQAGAEGSDLFAQLAAGVADVDAVTTRKKAPQQIAPPSTTTRAPDQVNEFVAEAESQPVEESVVEAKVPKQQVAPQPAQKPEQKPEQKSAQPAQSEPDDGFDMDDVMGQAFGR

SEQ ID NO: 2511 - DNA, 726 bp, Corynebacterium glutamicum
  CDS (47)..(703): RXA01966
ccctgttatgggctgggtttataagaagatgggttagtttttaaaagtgtctgaatctgaaaacaacacaacaccagcagtcgcagctcgcgatgaccgtctggtctgggtcgatctggaaatgactggtctagatttgaagcgccacgtgatcgtggaggttgcggcgttggtcactgacgctaacctcaacgttttgggcgagggcgtggacttggttgttcacgcaactgaagaagagctcgcgcagatggatgattttgtcaccaacatgcacgaatcctctgggctgactgagcagatccgggaatccgcggtcacgttgaaggaagccgaagatgctgtgctcgcattgattgaaaagcactgcgatccagcccatcctgcaccgctagctggtaactccattgccactgaccgcgcgtttatccgcgaacatatgccacgtcttgatgaggccctgcattaccgcatggtggatgtgtcctcggtgaaggaattggcgcgtcgctggtacccacgcgtgtactacaagcagccggagaagggtttggcgcaccgcgcgttggcggacattgtggagtcgattcgggagttggattactaccgtcgctcattttttgttgcagagcctggtcctacctctgagcagtgcgcagatgatgcgcaggcagcggtggaccgttttgcaccctactttgattagagggttttaagcagcctggt

SEQ ID NO: 2512 - protein, 219 aa, Corynebacterium glutamicum
VSESENNTTPAVAARDDRLVWVDLEMTGLDLKRHVIVEVAALVTDANLNVLGEGVDLVVHATEEELAQMDDFVTNMHESSGLTEQIRESAVTLKEAEDAVLALIEKHCDPAHPAPLAGNSIATDRAFIREHMPRLDEALHYRMVDVSSVKELARRWYPRVYYKQPEKGLAHRALADIVESIRELDYYRRSFFVAEPGPTSEQCADDAQAAVDRFAPYFD

SEQ ID NO: 2513 - DNA, 1281 bp, Corynebacterium glutamicum
  CDS (101)..(1258): RXA01968
gaactggcgctttttaagttgtggcaattttgccagaagggcgtaacaggtgcgggtttttcgtggtaggcgcggagcagtagcaggatcttttcttgcagtgctggcaattggttcactggcgcttacgggttgcacaattgaacgaagcgatgcgcaggagcaatcctcgcagcaaagtacagaagttgaagctgaagaagctcaagctcctgtgatttctgttgatgatggtgatgaggatgtggacccttcggaatctgtcatcgtaaagtcgatgggtgacggtctgagcaaggtcaccatgactaatgaagaaggctatgaggttgagtcagagctttctgacgatggccgtagctggaccactgcggaaacccttggctacaaccgcacgtacaccattaaggcaaccgataagaacggcgagaccgctactgcgtcttttagtactgcaacccctgcagctaccacaaacgtggcgctttctccgctggctgattctgtcgttggtgttggccagactatcggtttccgttttggttcccctgtgaaggatcgcaaggcggctcaggatgctattactgtgacaacttcaccaaaggtggagggtggcttttactggttgaacaacagtgagttgcgctggcgtccagcggagtactgggagccaggtactgaagttacggtcgaggctgacatttacggcaaggatctcggcggcggtgtctggggcgaaactgataacgccaccaacttcaccattggtgacaaggttgaggctgtggcagatgatgccaccaagaccatgagtgtgtacaagaacggtgagttgctgcgcactatgccggtatcctttggtcgtgacacctctgagtgggcaacgccaaacggtacctacatcattggtgatcgcaatgagtcgatgatcatggactccaccaccttcggtctgggatatgaggagggtggctaccgcactccggtgaagtacgcgacccagatgtcctattctggaatttacgtgcacgcagcaccgtggtctgtaggtgcgcaaggtagctacaacacctcacatggttgcatcaatgtatccaccgaaaatgctcagtggttccaggaggccgtgaagcgcggtgacattgtgaccgtgaaaaacaccatcggtgagactttgagtggctacgacggactgggggactggaacattccatggtctgaatggagcaaggggaacgcggatcaaacttcggcgtggtaactgcggaagtcgcaggtaaa

SEQ ID NO: 2514 - protein, 386 aa, Corynebacterium glutamicum
VLAIGSLALTGCTIERSDAQEQSSQQSTEVEAEEAQAPVISVDDGDEDVDPSESVIVKSMGDGLSKVTMTNEEGYEVESELSDDGRSWTTAETLGYNRTYTIKATDKNGETATASFSTATPAATTNVALSPLADSVVGVGQTIGFRFGSPVKDRKAAQDAITVTTSPKVEGGFYWLNNSELRWRPAEYWEPGTEVTVEADIYGKDLGGGVWGETDNATNFTIGDKVEAVADDATKTMSVYKNGELLRTMPVSFGRDTSEWATPNGTYIIGDRNESMIMDSTTFGLGYEEGGYRTPVKYATQMSYSGIYVHAAPWSVGAQGSYNTSHGCINVSTENAQWFQEAVKRGDIVTVKNTIGETLSGYDGLGDWNIPWSEWSKGNADQTSAW

SEQ ID NO: 2515 - DNA, 497 bp, Corynebacterium glutamicum
  CDS (1)..(474): RXA01969
aaatgccagcgtcgtggtttaagccaggatccgttgtataaaaaccggaattccttgttgaccacgcagaagtggtttagtcctcgtcagcaagaaagcttggagcagttgtgggcgtatgacaaagcctacggggcgttaaagcttgcgtggcttgcgtatcaggcgattattgattgttatcagatgggtaataagcgtgaagcgaagaagaaaatgcggaccattattgatcagcttcgggtgttgaaggggccgaataaggaactcgcgcagttgggtcgtagtttgtttaaacgacttggtgatgtgttggcgtatttcgatgttggtgtctccaacggtccggtcgaagcgatcaacggacggttggagcatttgcgtgggattgctctaggtttccgtaatttgaaccactacattctgcggtgccttatccattcagggcagttggtccataagatcaatgcactctaaaacaggaagagccacttaag

SEQ ID NO: 2516 - protein, 158 aa, Corynebacterium glutamicum
KCQRRGLSQDPLYKNRNSLLTTQKWFSPRQQESLEQLWAYDKAYGALKLAWLAYQAIIDCYQMGNKREAKKKMRTIIDQLRVLKGPNKELAQLGRSLFKRLGDVLAYFDVGVSNGPVEAINGRLEHLRGIALGFRNLNHYILRCLIHSGQLVHKINAL

SEQ ID NO: 2517 - DNA, 605 bp, Corynebacterium glutamicum
  CDS (1)..(582): RXA01973
tccgcgatgtctaaatcgcaggatgatcgaaaaattgcagagcttgaagcacagtttcatagtcttggtcttaacaacactgaactagttacccttgatgatgcagcgtcgctattgggtgtgccggcaggtattcatcagattgaggccgaggtgatgttggtgaatttcggtgatggtgcagatggcatgggcggtgacacgacgaagtttttgcattatcagccagatgagtcgcagccttacgtctgggtgatgaagcgggtgtattcctttgaggcgatgaaaaagctcatggtcgggttgtttattggcttgtgcatactcatcgtgggtgggccagctttagggcttatgctcggtggttttatcggtgtgcttattggtctatgtctaggtacttccgcagccatgattgttggcccttttgggcttatgcggatgaaggcgtatccaccatgtatggacagtccatgggtgtatatgtcacaagagcagtggcgcaccgctatgggtgcggcacagcagaccgaggtgtcttttgttgagcactgggacaatatttacggggataatctgcattaacaaattagttaataaagtgt

SEQ ID NO: 2518 - protein, 194 aa, Corynebacterium glutamicum
SAMSKSQDDRKIAELEAQFHSLGLNNTELVTLDDAASLLGVPAGIHQIEAEVMLVNFGDGADGMGGDTTKFLHYQPDESQPYVWVMKRVYSFEAMKKLMVGLFIGLCILIVGGPALGLMLGGFIGVLIGLCLGTSAAMIVGPFGLMRMKAYPPCMDSPWVYMSQEQWRTAMGAAQQTEVSFVEHWDNIYGDNLH

SEQ ID NO: 2519 - DNA, 1552 bp, Corynebacterium glutamicum
  CDS (101)..(1552): RXA01974
acaatatttacggggataatctgcattaacaaattagttaataaagtgtagtatttaattaattattaaattcaattaacttttttgtaaaggtgggaagatgacccaggttgtggcgggtacgttggtgggagagtcgattaatcgtgagattgatgaagacaagtacccttatttgagctcgtatgcagcgcctgttgctgtaccggtgcgtgagattattgggcgcgaagaagaagtcaataagattatggccgcgctgatgcgtccagagatttctaatgtcatgcttgtgggtcctgctggttcgggtaaaactacgttggtacagcaagcactggtgaaagatccagagcgtaactacatcgaggtcgatgtagcgaaaatggttgcggatttgagcaccccggcgcaaatggctgcgcgtattaaaggtgtgtttgaggacgccattgcctatcgcaagcacgaaggtcatgaattggtgctgttcgttgatgagtttcaccaaattgtgcagctgtctaatgctgcggtagaggcaatcaagccgattttggcgatgtctggtgtccttggtgtgcgcgttatcgctgcgacaactctcgaagaatttcacgaacacatcaggccgaaccaagcattgacggagcgtttgcaggaaattcgactaacgccgaccgatcagaagaccactgtggcgattttgcgtggtatggcagatcgttatggcgtaagtgatcagttctatgacgaccacgtttttgagcagatttactccaccactgagcgttttatgccgagttctgtccagcctcgtaaatccattcgtgtccttgatgcgatggttggttggcatcgactttccggcaagccgatggatatggatctgctcggtgatgtgctccacgatgctattggtgtcgatattgcattcaaggtcgatggtacgagcattaaagacaagcttgatgagaaggtaatggcgcaaagtcttgccaccactgtggtagcacgtcgtttgcagctggtggtggcggatcttcatgataaatcacggccactgtcgaacttcttgttcaccgggcctactggtgtcggtaaaacagagctggtcaagcaactagcacgggtgctctttggtgatgacactgggcgattgattcgttttgacatgtcagagttcgccttagaatcaagtcttgaccttttcaggtctgagctcactcgtcgtgtcgctgaccagggtaacgctattgtcctgctcgatgaggttgagaaagctgatcgagctattgcgcggttgttactgcaggtacttgatgatggccgactatctgacgattacaaccgtgaggtgagttttcttaatacctatatcgtcatgacaactaacgctggttctgagattttcgagacaatttcgaactatgccactgatgacacgggcgatggtcgggcgatcaaagactttgtgaaaaacattcacacgtcgatcaagaataagggttttccacctgagcttcttggtcgtgtagatgaaattgtgcct

SEQ ID NO: 2520 - protein, 484 aa, Corynebacterium glutamicum
MTQVVAGTLVGESINREIDEDKYPYLSSYAAPVAVPVREIIGREEEVNKIMAALMRPEISNVMLVGPAGSGKTTLVQQALVKDPERNYIEVDVAKMVADLSTPAQMAARIKGVFEDAIAYRKHEGHELVLFVDEFHQIVQLSNAAVEAIKPILAMSGVLGVRVIAATTLEEFHEHIRPNQALTERLQEIRLTPTDQKTTVAILRGMADRYGVSDQFYDDHVFEQIYSTTERFMPSSVQPRKSIRVLDAMVGWHRLSGKPMDMDLLGDVLHDAIGVDIAFKVDGTSIKDKLDEKVMAQSLATTVVARRLQLVVADLHDKSRPLSNFLFTGPTGVGKTELVKQLARVLFGDDTGRLIRFDMSEFALESSLDLFRSELTRRVADQGNAIVLLDEVEKADRAIARLLLQVLDDGRLSDDYNREVSFLNTYIVMTTNAGSEIFETISNYATDDTGDGRAIKDFVKNIHTSIKNKGFPPELLGRVDEIVP

SEQ ID NO: 2521 - DNA, 1644 bp, Corynebacterium glutamicum
  CDS (101)..(1621): RXA01976
gtgattccgggcgtcttcgcttagagtaaattaaaccgtaaaaataaactcaattaagttagtatattaattacttgatttaattgaaggggtttatagtatgacgcaaacacttgctggcgagcgcagaatcgtcaccacggcagagcttaaagcgatgctggcacgaggggataaggtgtttctgcctggtgtcgcagcgcgggcgccagagatcctcgacaacttcgatccagcagatcgggcacgtctcgacgtgcccgcagcagacaatgaaatcgtctctgtagaattctcccgccgcgataccgtgcaatgcatcagcattgccgaccgtgaccatctctacatcactgacgatatgatcccgacccacaacacgtccaacattatcttcttgaaatccacagacgaaacaatgattaagacgttggtggattggtcaggtgagcgacatgttgtacgcagaaattcaaagaccgtaacccgtgacttggcacagttagttatgcgcaccgagggtaaagtgtcgtacacgtctgcaactgaaaaagagccggtggtgtcttataatgacctaaatactctgccatcgcagaacgccatcgtcttccgtgcgggtcagtatccggtgtggtcacgcaatgaaacgatttggccgatgtcgttcatgttgtttgctaaccagattatccaaccgggtcgcgaatactcgttgcagactattccaacactgtcgagcgctaatgaattcgatgtgaatcaaaatgcaccggactttatggcgatgctggaaaagcgcatggcgcagtcgattcgtactcagcgtgccgtcgatatttataaaaaggcgactgggctcgatgactctgatattgcacgcctggatatggatgtgtattcagcagaaatcatggacatcgtggacacgatgatcgcgaaagatgagtacgatgacacgccggattatgacgagggggatgagtctgtcatgaatgctcgtgatttcatggagtctgaatatgacgtttttgatgatgagttcgaagacagtgctcagggcttccccgtggctactggtacgaaggtgaaaaagaaatctctgtctgaagaagcagaggtcaatgatgaattcattcacgatcaggagaatgcagaacataagctcgctgacatgcggttgaagcgttatgccgaaggcaaggtgtcacgagatatgctggctgatcaattcggccacatcctgcaggactcactcgaagatgagctcactgcagcctatgatgagagcctgcacgcttttgctcaagatccgaatttccgggtgactgctaacaacggcttggttaatgctgtcgatggcactgtgttgattgaggcgttgtcgcaggaagatattgcacttatgcgcgcgcaagcaggagtggagcagtcgcgtgtctactctgagggtgaagaagctctatctggcacagaggatgatccgctgtctgctatgggtaaatataagaccacccgagcattccgcatcatgctggtggagcttccgcattggcgtgatctcgcccagggtcactttgataaagaagtcgcgcgagcctttaggcgtattgaagatgcttaagtgtcgtgagcgataaaaaa

SEQ ID NO: 2522 - protein, 507 aa, Corynebacterium glutamicum
MTQTLAGERRIVTTAELKAMLARGDKVFLPGVAARAPEILDNFDPADRARLDVPAADNEIVSVEFSRRDTVQCISIADRDHLYITDDMIPTHNTSNIIFLKSTDETMIKTLVDWSGERHVVRRNSKTVTRDLAQLVMRTEGKVSYTSATEKEPVVSYNDLNTLPSQNAIVFRAGQYPVWSRNETIWPMSFMLFANQIIQPGREYSLQTIPTLSSANEFDVNQNAPDFMAMLEKRMAQSIRTQRAVDIYKKATGLDDSDIARLDMDVYSAEIMDIVDTMIAKDEYDDTPDYDEGDESVMNARDFMESEYDVFDDEFEDSAQGFPVATGTKVKKKSLSEEAEVNDEFIHDQENAEHKLADMRLKRYAEGKVSRDMLADQFGHILQDSLEDELTAAYDESLHAFAQDPNFRVTANNGLVNAVDGTVLIEALSQEDIALMRAQAGVEQSRVYSEGEEALSGTEDDPLSAMGKYKTTRAFRIMLVELPHWRDLAQGHFDKEVARAFRRIEDA

SEQ ID NO: 2523 - DNA, 699 bp, Corynebacterium glutamicum
  CDS (101)..(676): RXA01977
aagtccagtgactaataccaatagaattgaagaccactacctcaagggcggacgtggcaggggcacagacgatcctagcaatatgcaaattgcaggaagtatgttgcgcacattattcgtccgcaagattagagcgctgctgctggttttgatgattgcgccaactccattggtcgaagggctaacttcgactgcaatgattgtatccgtagtaatcctggcgatctacatggcgataacaatgtatagagtagtgcacggtcgccatgagttcgcgcatatcgcacgtcgcatggcgctttacgtcaacaagacttcttctaggttcagtgttgttattgcttatgtagtattaattgctatttatgcgctactaattcccggacttgtctactctgttacatttggattcatcgtcccaagcacacctaatacgtttagtgatgcacctgcatggattatgtgcgtatcgctgctgctcattgcagtcgccagtttcatcacatcaatcatggatgactttattgatggcatactcactgatttttatgacgaagataatgctgatagccccgatagtcctgccgaggatatagccacccgtcctgtcgagagcgcaacaacaagtgctcttgctggatttgctgttggttatatttgtgggcgctttaatcgctaacacttaaaacacttctcaac

SEQ ID NO: 2524 - protein, 192 aa, Corynebacterium glutamicum
MLRTLFVRKIRALLLVLMIAPTPLVEGLTSTAMIVSVVILAIYMAITMYRVVHGRHEFAHIARRMALYVNKTSSRFSVVIAYVVLIAIYALLIPGLVYSVTFGFIVPSTPNTFSDAPAWIMCVSLLLIAVASFITSIMDDFIDGILTDFYDEDNADSPDSPAEDIATRPVESATTSALAGFAVGYICGRFNR

SEQ ID NO: 2525 - DNA, 1281 bp, Corynebacterium glutamicum
  CDS (101)..(1258): RXA01982
tgccgccgaccatgagatgatcaagcgctttttcaccctgcaccttcgctaagactctaccttcacccaactcatcatctactgaaagaaggcttctgctatggctaccaccagcctccccacgacgattacaccggattccgaggagaccgtagaaaagcgtcactccctgaccccgatcctggattcacttccctgcgagtcagttccctatgctctggctgcaggtgagggacaacaacaccagcttggcccctaccatctcacagttatgtcccgtcccgaagacaacggtggaatattttcgctggctcgtgtgagcgcaggcaagactcccgccacccggttcttctctgtcgcaggaccgacgttcctctacatgatggaggggcggttgactctctggttcgctgatggacgtcaagagatcatcgctggcggcagtgccaccattcctacgaatacgccctggtccttcgcctgtgagggcctagtaaattcagctctagtgtactactcatcctcgaatgcattcctacacgcggcagagaaacttggcacgtcctcgttctcccacaccttccgcgtcagtggcgaggtcacagggattccctacgaggaactggaggattgcggattcacattctatgagcgggaccaccttgccgagctcgggccgcatttcgatcgcctcccagaagatatgaaggcgtttgccctgaacgatggtgagggggaccggcttgagcagttcgagcagatcaacagcttcgtctgccgtccgagacacaccggaaatcagttcctcgctatgcagaccaagggtgccaagacgccttatatacctcgtcatttccaccgccttcacaccgaaaacttcatctgtctggacgggcgcgtcaaactgcacgtcaacggtcaagagatcatcctctcccgtggggattacgttcatgccccagccggaaccatccactctttcgccttcgcagggcacaatacccagatgctgggagtgctcaccacagaggtattcgagaagttctttgactacataaacactccgactaatgctcgagttcagctggaggacggggggaagccattttttcctgctgaagcattcgcgaaagtccaagctgaactcgatgtcgtggtggtcggccccccacgaattagtaccctggatgttgttacaaactcgcgtttcgaaccaattaacagaactatcacctatcgtgcgctggacgctaaccaatagtgagtgagccgaaatccctg

SEQ ID NO: 2526 - protein, 386 aa, Corynebacterium glutamicum
MATTSLPTTITPDSEETVEKRHSLTPILDSLPCESVPYALAAGEGQQHQLGPYHLTVMSRPEDNGGIFSLARVSAGKTPATRFFSVAGPTFLYMMEGRLTLWFADGRQEIIAGGSATIPTNTPWSFACEGLVNSALVYYSSSNAFLHAAEKLGTSSFSHTFRVSGEVTGIPYEELEDCGFTFYERDHLAELGPHFDRLPEDMKAFALNDGEGDRLEQFEQINSFVCRPRHTGNQFLAMQTKGAKTPYIPRHFHRLHTENFICLDGRVKLHVNGQEIILSRGDYVHAPAGTIHSFAFAGHNTQMLGVLTTEVFEKFFDYINTPTNARVQLEDGGKPFFPAEAFAKVQAELDVVVVGPPRISTLDVVTNSRFEPINRTITYRALDANQ

SEQ ID NO: 2527 - DNA, 1022 bp, Corynebacterium glutamicum
  CDS (1)..(999): RXA01990
acatctgatcatgtggcacagtttggtatggcaactgcgtctgctgcgacgttgccggacagtattgtgaccagtgtttcttatacgttgaacgggctgtcattttctgacccggttgagctgggtatcagtgacaacgacaagcgtgaagagcttctaggagacatcaccaagggtgaactgcgattgcagatggagttttcgatcccggattcagcaactgccgaggatgagtacgtctttaatctcaccggcgatggacttcggtttttcaattcaaacgatcgcaccgtccctgtacgcaatgatgcaggtattcgtgtcgcagatcttttggtgagcaacggtggtacgcgcggtacgttgacaaactttagttcggatgctggcactacttctcgcaccgcagctcttgatatggaactgtacgggtgggtgagtagcgcccagcagacgggtgagcgaccaattcaagactggactgtgggtaagactgagggtcaggttgagaacaaggtagtccgctacggcgttgctggacacccgtggattatcagtactgtccagcacacgtgggttaagtctacgcagaccgtgtcgcatttccgaagtgaacaagactggaagattaatcaaccaccagctgttgatatgggcgcattagcatacgcagctccacttggcgtcgtggtcgggcacgccaatgttgtcattagcaataacaacggtgctggattccggggtgcgcttgtcaataccacacccaccacacgcgacgtgatacttaatttcacagccgcagacggagccactttacgcgaacgttccggaggtggatttgaggatttcgacgttttctcggaagttcctcgggtagaggaaacatcgacgaggatcagctattcttacaaaaattcatttgaatatgacgaatttgttgccgcatttcccgagtaccgacgtagctgcgtgggaaccaaccgttgtgtattcagcggataagaccacagcaacagcgacgt

SEQ ID NO: 2528 - protein, 333 aa, Corynebacterium glutamicum
TSDHVAQFGMATASAATLPDSIVTSVSYTLNGLSFSDPVELGISDNDKREELLGDITKGELRLQMEFSIPDSATAEDEYVFNLTGDGLRFFNSNDRTVPVRNDAGIRVADLLVSNGGTRGTLTNFSSDAGTTSRTAALDMELYGWVSSAQQTGERPIQDWTVGKTEGQVENKVVRYGVAGHPWIISTVQHTWVKSTQTVSHFRSEQDWKINQPPAVDMGALAYAAPLGVVVGHANVVISNNNGAGFRGALVNTTPTTRDVILNFTAADGATLRERSGGGFEDFDVFSEVPRVEETSTRISYSYKNSFEYDEFVAAFPEYRRSCVGTNRCVFSG

SEQ ID NO: 2529 - DNA, 573 bp, Corynebacterium glutamicum
  CDS (101)..(550): RXA01992
atagatcaatgctggcataaactaaaggcacaacagccgattcacttatttttaggcgaatgcttgaagtcgaagtaagtgagggggagaggatccgttagtgtactgcccattttgccaacatgatcattcaaaagtcattgactcccgcgtcattgacgccggaagcgccattcgcaggcgccgcgagtgcagcaaatgcgaaggccgtttcaccaccatcgaaaaagctgttctcctcgttgttaaaagaaacggcgtcactgaaccgttcagtcgagaaaaagtagtcaccggtgtccgtcgtgcatgccaaggccgcgacgtatcagatgacgcgttgaaacgcctagctcagcaagtggaagaaacagtccgcagcaacggaagctctcaagtacgcgctaacgatattggtttagccattctcgatccactgagagaactcgacgaggtagcgtacctacgctttgcctctgtgtataagtcttttgacagtgctgacgactttgaaaaagaaatccgcctcatgcgcagacgcggaagggactagcagacacaaagtcttaacta

SEQ ID NO: 2530 - protein, 150 aa, Corynebacterium glutamicum
VYCPFCQHDHSKVIDSRVIDAGSAIRRRRECSKCEGRFTTIEKAVLLVVKRNGVTEPFSREKVVTGVRRACQGRDVSDDALKRLAQQVEETVRSNGSSQVRANDIGLAILDPLRELDEVAYLRFASVYKSFDSADDFEKEIRLMRRRGRD

SEQ ID NO: 2531 - DNA, 594 bp, Corynebacterium glutamicum
  CDS (101)..(571): RXA01999
gggtatgtagttagagacgacagacacagaaatcttcagcctcgcgaaccgagtgatagcatacttgaccatatcgaattctctaccagctcgaggcatcatgactctccccacccctacacattccaccaaaggcagttcaggccgcatgaaacgaatggcccttatcggctcctcgctcattatttccatgggacttattactgcgtgcggttcggccgctgcagaacccgaagcccctgcaccaacagttaccgaaactgtaacagccacggtgacaaccacagctaaagccagcacgatcacctcgacagtgacggaaactacctccgcggaagatcttgcccaagaaattgtgaagccagcggccgtggaggaatattcagagcctcaggtaaatacgccacagcagtttgcggccatcccggaacctgcaccggcggttgcaccagctcaaacgtattacgccaactgcgcggcagttcgtgcggcgggtgcagctcccctttatgcgggatcacctggatatagttccaagcttgatcgcgatggcgacggaattgcctgcgaataaataggaatagttaaaaacac

SEQ ID NO: 2532 - protein, 157 aa, Corynebacterium glutamicum
MTLPTPTHSTKGSSGRMKRMALIGSSLIISMGLITACGSAAAEPEAPAPTVTETVTATVTTTAKASTITSTVTETTSAEDLAQEIVKPAAVEEYSEPQVNTPQQFAAIPEPAPAVAPAQTYYANCAAVRAAGAAPLYAGSPGYSSKLDRDGDGIACE

SEQ ID NO: 2533 - DNA, 572 bp, Corynebacterium glutamicum
  CDS (1)..(549): RXA02001
acccgcgaccccatcgtcgcagccgtcggaattgtccaagcgtttcaaacgatagtcagccggaatcacaatccggtcgaggaccttgtcgtgtcggtcacgcaaatccacaccggcagcgccgataatatcatccccgaaaccgcctatatcaacggcactgtccgcaccttcaacaaagacgtgcaggccatggtcatcacgcggatggaagaaatcgtcgcgggccaagctgcagcctatggggtcgaggcgacgctgacctacaaccgcaactatcccgccaccattaacgacgccgccaaagccgccatcgctgccgaagtcgcgggcgaggtcggcctcggggtcaacccgaacggctcgcgcgggatgggggccgaggatttctcgtatttcctcgaaaagcgcccgggtgcctacctgttcgtcggtaatggcgacagcgcgggccttcacaaccccgcctataatttcaacgacgaggccgcgccctacggcgcatcgttcttggcccgcatggcagaacgccccttgccgttaaagggctgatccatggcgctcgaagatgc

SEQ ID NO: 2534 - protein, 183 aa, Corynebacterium glutamicum
TRDPIVAAVGIVQAFQTIVSRNHNPVEDLVVSVTQIHTGSADNIIPETAYINGTVRTFNKDVQAMVITRMEEIVAGQAAAYGVEATLTYNRNYPATINDAAKAAIAAEVAGEVGLGVNPNGSRGMGAEDFSYFLEKRPGAYLFVGNGDSAGLHNPAYNFNDEAAPYGASFLARMAERPLPLKG

SEQ ID NO: 2535 - DNA, 230 bp, Corynebacterium glutamicum
  CDS (1)..(207): RXA02004
cgcgtcggccgtctgatgcgtcagaacggcattctcatcatccgcagccggaagttcaagcgcacgaccggcagcgatcataccttcaacatcgcaccgaactttctgcagcaggactttatggcgagcaggccgaaccagaagtgggcgggcgacatcacctatgtctggacgcgcgagggcctgggtctatctggccgacattcttgacctttatccccgccgggtga

SEQ ID NO: 2536 - protein, 69 aa, Corynebacterium glutamicum
RVGRLMRQNGILIIRSRKFKRTTGSDHTFNIAPNFLQQDFMASRPNQKWAGDITYVWTREGLGLSGRHS

SEQ ID NO: 2537 - DNA, 565 bp, Corynebacterium glutamicum
  CDS (71)..(565): RXA02006
atcatccatacatgcagagcacagctttcacacatagacatcactgcacatttatctaatgggagactcaatgacagttgcacacaaacgaagtctgacatggatcaagagactatctgcgactacatttgcagcttttcttggcattcagcttgtgacccccgctcactcaattgaaaacacgacgcagattccagaaagcgaattgcacaacctcgggctcacagacgaagaaattcaagaattcaatcaatatctcattgacgagtcactctttcaagagactgtagaaacctctccgatcgtagtcagcgacaatgaagatgcagcccaagatcccggtttcggccttttcaccacaaatcctgtgaaacacacagatgagcacattggcgctctatacttctccgacctaccaggtatttccaatcttacgtgcactgccaactacatcggtggaaaattctggaccacagcacatcattgtgttgaaggccgcagtcgcttcgtcggcttcatcgagcagtcggacggacaatatgcaggcattgagcatgtttacaca

SEQ ID NO: 2538 - protein, 165 aa, Corynebacterium glutamicum
MTVAHKRSLTWIKRLSATTFAAFLGIQLVTPAHSIENTTQIPESELHNLGLTDEEIQEFNQYLIDESLFQETVETSPIVVSDNEDAAQDPGFGLFTTNPVKHTDEHIGALYFSDLPGISNLTCTANYIGGKFWTTAHHCVEGRSRFVGFIEQSDGQYAGIEHVYT

SEQ ID NO: 2539 - DNA, 223 bp, Corynebacterium glutamicum
  CDS (101)..(223): RXA02009
aactgcatcattgtcgttcctgaacaagcgccgtggtttaagccagccatcatcaaacaggcttaaaaatactcaatcgtcccattcaagaaaagagcacatgaccatgtacaacgccgcaaagacccttgttccccagattgttgctttcgatgacacagcaatcatcgcactcgaccaagccgcggaagatgaattccgcaaggctaactaccccgaggtt

SEQ ID NO: 2540 - protein, 41 aa, Corynebacterium glutamicum
MTMYNAAKTLVPQIVAFDDTAIIALDQAAEDEFRKANYPEV

SEQ ID NO: 2541 - DNA, 649 bp, Corynebacterium glutamicum
  CDS (101)..(649): RXA02013
atcaccgcgctggcgacaatttcagaaaactcccacaaagcactgcttggcctttatttgtccggtcttaaacacggcatgatggctaacatcggagaacatgacggaaagtcctgatctagcagtttcctttttagccgccttcaatgacatcgaagcgcaccttcgaacccagctccgcgctaaacgctccgacagtttcagatggatggtacgtatcgccgagaaacagcatctgatttccaaagaacaagcagaaacccttgatgcttttgcggagctgcgcaacgcaattagccacggccaatacaacgatctacgcccgattgccgatccccgccccgacaccgtggacaccattgagaagattcgctccctccttctcaatcctccaattgcgttaaacgtcctcccggagcaaaaggtccgctcctactcacttgaagatccagtgagtagggccttagaagttgtgcacaccacggagatctcccaattccccatatataagggaacggaatacgtggcactgctaactaccaacacaatcgctcgctgggttgcctccgatttacatgacaatgcccagctggatgcacgttctatcaaagaggttctggattatgcagaatcctctgacactgcagtt

SEQ ID NO: 2542 - protein, 183 aa, Corynebacterium glutamicum
MTESPDLAVSFLAAFNDIEAHLRTQLRAKRSDSFRWMVRIAEKQHLISKEQAETLDAFAELRNAISHGQYNDLRPIADPRPDTVDTIEKIRSLLLNPPIALNVLPEQKVRSYSLEDPVSRALEVVHTTEISQFPIYKGTEYVALLTTNTIARWVASDLHDNAQLDARSIKEVLDYAESSDTAV

SEQ ID NO: 2543 - DNA, 1071 bp, Corynebacterium glutamicum
  CDS (101)..(1048): RXA02021
ttgggtcgccgaggagatctaatcctggtttgagttcagagttcacaggtttaagcctacaaaccttagttaaaacatgatggaagcggtcgattaaaaaatgagtgaaaacattcgcggagcccaagcagttggaatcgcaaatatcgccatggacgggaccatcctggacacgtggtacccagaaccccaaattttcaacccggatcagtgggctgaacgctacccattggaagtgggcaccacacgcctcggagcaaacgaactcaccccacggatgctgcagttggtaaaactggaccaagatcgcctcgtcgaacaggtagcagtccgcaccgttatccccgatctgtctcaacctccagtagacgcgcacgatgtttacctgcgcctccacctgctttcccaccggctggtccgcccccacgaaatgcacatgcaaaacaccttggagctgctgtccgacgtggtgtggacaaacaagggcccttgccttcctgaaaactttgagtgggtgcgtggtgctctgcggtcccgcggactcatccacgtctactgtgtggaccgtcttccccgcatggtcgactatgtggttccccctggagtccgcatctccgaagcagaacgcgtgcgcctaggtgcataccttgctccgggtacctctgtgctgcgtgaaggtttcgtgtctttcaactccggcaccttgggtgccgcaaaggtggaaggccgcctgagttccggtgtggtcatcggtgaaggttccgagattggactgtcttctactattcagtccccgagagatgaacagcgccgccgtttgccgttgagcatcggccaaaactgcaactttggtgtcagctccggaatcatcggagtcagtctgggagacaattgcgacatcggaaataacattgtcttggatggagatacccccatttggttcgcagccgatgaggagttacgcactatcgactccatcgaaggccaagcaaattggtcaatcaagcgtgaatccggcttccatgagccagttgcccgcctcaaagcttgacccattttcataaccagtgc

SEQ ID NO: 2544 - protein, 316 aa, Corynebacterium glutamicum
MSENIRGAQAVGIANIAMDGTILDTWYPEPQIFNPDQWAERYPLEVGTTRLGANELTPRMLQLVKLDQDRLVEQVAVRTVIPDLSQPPVDAHDVYLRLHLLSHRLVRPHEMHMQNTLELLSDVVWTNKGPCLPENFEWVRGALRSRGLIHVYCVDRLPRMVDYVVPPGVRISEAERVRLGAYLAPGTSVLREGFVSFNSGTLGAAKVEGRLSSGVVIGEGSEIGLSSTIQSPRDEQRRRLPLSIGQNCNFGVSSGIIGVSLGDNCDIGNNIVLDGDTPIWFAADEELRTIDSIEGQANWSIKRESGFHEPVARLKA

SEQ ID NO: 2545 - DNA, 504 bp, Corynebacterium glutamicum
  CDS (101)..(481): RXA02036
ctaaaatggaaggcaatggatacccgccgcatgaacctccgccaatggaaaatcctcgttgccctcatctctgctgcagtggcggctctcggagggtggtgtgcatattccttttgggcacctcgccgacaccgtctcctgggactgcgggggaggcagctgcgccaccaacgatttggtatccctgttcatgccggccgccttcatgagtaccctcgccgcctgcgtatttggcgcgtgggccataggtttgatcgctcccgcactattcatcgcggtgactgcctgggcatttcgctccggcgtgcaggctgcgattgccgacggctacacgtccgcgacttccgtcggcttcgaaatgactgtctcgctcattcttttcatcatcgcaggtctgtgctttctgggctggatccccatgttcatcaacaaccgccaagtcgcgcgcaaggtccgcgagagggctgcgggcttgagcaattaggctctcgcttttcgacgttt

SEQ ID NO: 2546 - protein, 127 aa, Corynebacterium glutamicum
VHIPFGHLADTVSWDCGGGSCATNDLVSLFMPAAFMSTLAACVFGAWAIGLIAPALFIAVTAWAFRSGVQAAIADGYTSATSVGFEMTVSLILFIIAGLCFLGWIPMFINNRQVARKVRERAAGLSN

SEQ ID NO: 2547 - DNA, 551 bp, Corynebacterium glutamicum
  CDS (1)..(528): RXA02040
tacataccttttgtcatttggtccgatctcggtgaggctgccgaaggtgagaactttgctcgcttctggtcctggctgaaatcgcgccgggacaaagctcgccagcagggacaaaccttcggtgtgttctgctatgccagcaacggcgaaaaccactggatgctctccactgctcgcagattcttcggcaaagtcaaaggtgtgcccgacgagcaagaaatccgcagcttcattagctctgaccaatggaatgacatgtttgctgtcgcgcgctcccaacttgttggccccggtggtttaggtctgaaacaactcgcgccggcagctggattccattgggaggaagaagacttcgcaggtgaagatagcctccacgcatatctcattgcttccacggctgccgaaccagaagctgaggccgctcgtgctcaattgctcagctacaacggcgatgattgcagggccaccgcagcggttcgccattggcttcgacaaggtgcgcgcacggcacctgtgctggggaatatttaaaccaaggaaggattctccag

SEQ ID NO: 2548 - protein, 176 aa, Corynebacterium glutamicum
YIPFVIWSDLGEAAEGENFARFWSWLKSRRDKARQQGQTFGVFCYASNGENHWMLSTARRFFGKVKGVPDEQEIRSFISSDQWNDMFAVARSQLVGPGGLGLKQLAPAAGFHWEEEDFAGEDSLHAYLIASTAAEPEAEAARAQLLSYNGDDCRATAAVRHWLRQGARTAPVLGNI

SEQ ID NO: 2549 - DNA, 364 bp, Corynebacterium glutamicum
  CDS (101)..(364): RXA02046
tccgtgccatcaccaccggcgagatcactggcatcgtggacgcaaaacaaacagcaacagaaattattaacatccgacgcaacgcttcaggagagtcctcatgaaagagacactgaccaccggtttaacccaccaaatgacctacatagtgccagcaaaccgcacagttccgcatctgcttcccgaagcagcagaatttgaaaccatgccagatgtcctggccactggatatatggtcggcatcatcgagtgggcctgcatggaacttctgcgtccccatttggacgacggtgaaatctcgctgggcactcatgtgaacttctcccacgcagctccaacggttcctggatccacggtcaccatc

SEQ ID NO: 2550 - protein, 88 aa, Corynebacterium glutamicum
MKETLTTGLTHQMTYIVPANRTVPHLLPEAAEFETMPDVLATGYMVGIIEWACMELLRPHLDDGEISLGTHVNFSHAAPTVPGSTVTI

SEQ ID NO: 2551 - DNA, 621 bp, Corynebacterium glutamicum
  CDS (101)..(598): RXA02051
cgcactgatcggtgtagtaactggcggtattttgctgctaattaactcgcaaaacggtgagcagacatcatcttcaactcgcacaacagtcaatgactccatggtcatcagagctctccagcgcgaagaagaaatcgtccttctcagcgccggagcacttggaatccatgagaaaaccgttgaacgtacaattcgtggaaaacgtattcctggcacgcaaaagaccgtgcacgtccaatacagctacaccggaaaactcggaatcgatgcctcagatgttgaaatcaaatccgcaggtgacaataagctttccatcactatccctgagttcatcttcatcggatacgacgatctaaagtttaagaccatagccgaagatgacggttggatcagtttcagcactgacgatatcgatactgcagaagtagtttctgagatcatgagccaagagaacttcgtcgagcaagtaaccactaaccgggaaatgttggaagatcaagcggttgatttctacaacgacctgctccacgaattcaccgagaaactcgatacagatcgatacgaagacaccaagattgagctcgaattcgagtttgagtagatagtgcttcgaagacagtt

SEQ ID NO: 2552 - protein, 166 aa, Corynebacterium glutamicum
MVIRALQREEEIVLLSAGALGIHEKTVERTIRGKRIPGTQKTVHVQYSYTGKLGIDASDVEIKSAGDNKLSITIPEFIFIGYDDLKFKTIAEDDGWISFSTDDIDTAEVVSEIMSQENFVEQVTTNREMLEDQAVDFYNDLLHEFTEKLDTDRYEDTKIELEFEFE

SEQ ID NO: 2553 - DNA, 702 bp, Corynebacterium glutamicum
  CDS (101)..(679): RXA02053
aaccagccagaaactatctccaaaagctaataaaacccttgcactgacaaataaggcgacctaccatgactctgtttccaacacataaaaaggataaaaaatgtcactttcagtcgtcgaggcgattaccaaccgccgcgccacccgcaaatacaccgatgaagctcctacccctgagctgatcgacaaaatcgttgaccttgccctggaggcacccagtgcgttcaatgcgcagcaacgtgaaattgttgtgattactgatcccgcacagaagcagaagctttacgaggcctcccatcagaaacaattcctcaccgcacctgtaactttcattgcggttgcccgcgtggaaaacgagcctgaggatttggaagagattcttggtacggaaagggctgaacgtgtcgcgggattcatcaacggtcgcagcattcagcaggcacgcgaagcaacgttgagggatgccagcctcgcggcggcttttctaattctggctgcccaggcggagggtttgagtaccagcccgactactggttgggatgaggaaaaagtgaaggaagcaatcggtctcggcgggcgtgaggatcgtgcaatcgcccttgttattgctaccggattccctaatgaacagccggagcaccctggtcgtttgcagaataggcgcatcgacaacagctactaactctgccagctcgcccggac

SEQ ID NO: 2554 - protein, 193 aa, Corynebacterium glutamicum
MSLSVVEAITNRRATRKYTDEAPTPELIDKIVDLALEAPSAFNAQQREIVVITDPAQKQKLYEASHQKQFLTAPVTFIAVARVENEPEDLEEILGTERAERVAGFINGRSIQQAREATLRDASLAAAFLILAAQAEGLSTSPTTGWDEEKVKEAIGLGGREDRAIALVIATGFPNEQPEHPGRLQNRRIDNSY

SEQ ID NO: 2555 - DNA, 654 bp, Corynebacterium glutamicum
  CDS (101)..(631): RXA02057
aagtctttatagtcctgcactagcctagaagggccttatgccgtgtgaatcacacagcatacggccctttttgctgccgtggttgcctaaggtggaaggtatgaaacgaatctgtgcggtcgcgatctcttcagtacttttgttaagtggctgctcctccacttccacaacgcagctcgagggattcgatggacgctcagcgcaggagatcatcacagaacttgatcaaaccccagtcgcagacagagcaactaacctcatggcctccattcgggcagatgagttaattctgtcggatcaaagcggacagctcagcattgacatgcctgcagatgagttctatatctccgcagccccgtacaccaccacaacccacgagtgcttctatcacagcctcaccacatgtactggtgaactcgccaacaccccagtgaaagtaacggtggtggcagataatggagaaaccatcctcgaagaggacaccatcacctacgataatggatttgttgggatgtggctcccccgcaacattgatgccacactcaccatcgaacatgacggcctgaaatccacccagccgatctctacgggtgatgacgcccccacgtgcatcaccacggctgaactagcgtgaaaatcctttagacaataaga

SEQ ID NO: 2556 - protein, 177 aa, Corynebacterium glutamicum
MKRICAVAISSVLLLSGCSSTSTTQLEGFDGRSAQEIITELDQTPVADRATNLMASIRADELILSDQSGQLSIDMPADEFYISAAPYTTTTHECFYHSLTTCTGELANTPVKVTVVADNGETILEEDTITYDNGFVGMWLPRNIDATLTIEHDGLKSTQPISTGDDAPTCITTAELA

SEQ ID NO: 2557 - DNA, 675 bp, Corynebacterium glutamicum
  CDS (101)..(652): RXA02058
gaagcggattttagtccttgcgcttggtgcctcggtagcgggatgctcaacgctttcccaagaaccttcaccacctgttccgttgggaaacgttgatactgtgcagattgtctctcccaatggggagattgagtcttttgtgctggggaagctgtatgagaccgcattagtggaacgtggcagatctgcatcagttcagctgattgacggcgacttggatgagcaactatctatgctgcgagatgacagcactgatttggtgattgcttgctcaggacaattactggaatattacaacccagatttagcctccgagtttgccgtcgaatacgctaatcagacagcctttgataaaaactctggtgaatggcgcgaaaaagtctacgatgctctccaaggatcgctgccggactccatcgtggccaccgatccttccaatgctattggttgtaaggacgatacgtcgctgcctcaaaacatcgtgccaatttatagaaagcccaatctggatagggacaatcgggacaccctgaactttgtgagcggttctttgggtacaagcgatttggaagcattggtcaaggacgcccaaacaacaggcacaacctctgaaactgcgctggatttcttattgtctaaaggattttcacgctagttcagccgtggtgatgcacg

SEQ ID NO: 2558 - protein, 184 aa, Corynebacterium glutamicum
VQIVSPNGEIESFVLGKLYETALVERGRSASVQLIDGDLDEQLSMLRDDSTDLVIACSGQLLEYYNPDLASEFAVEYANQTAFDKNSGEWREKVYDALQGSLPDSIVATDPSNAIGCKDDTSLPQNIVPIYRKPNLDRDNRDTLNFVSGSLGTSDLEALVKDAQTTGTTSETALDFLLSKGFSR

SEQ ID NO: 2559 - DNA, 702 bp, Corynebacterium glutamicum
  CDS (101)..(679): RXA02069
cgccatctgcttggtgccgtagctgtcgatgacttgctcgaccacatgctgccagaagactggcgcgacgccggaatccgaccaggaaaggagcacacccatggctgatttcaaccgctctgaattagacagcccactttttggatcccgcaaacgatttaaattcgacgatgacaccattggtgcctacgccgaaaaagtagcccggttctttggcacgggacagtacctgttttggcaaaccattttcgtggtggtgtggattttcctcaacatcggtggttgggcctggagttgggacccctaccctttcatcctgctcaacctggcattctccacgcaggctgcttatgctgctccgctgatcctgttggcgcaaaaccgtcaagaagaccgcgataagcacaccattttggcggatcgtcggcgtgctgaagagacaaaagccgatactgaattcctcgcacgggaactcgcaggcgttcgcttagccttgggagatactgtcacacgtgactatttgcgccatgagttagaagatctccgcggacttcttgaccgcattgaagccaagctcgacgacgaggcagcgtcccgtattgcagaccgccacgaacagcacggatcaggacctcaagatttgtctgaccccactcagggtgatgttgcagacgaattttagggagtatcaaaacttgggac

SEQ ID NO: 2560 - protein, 193 aa, Corynebacterium glutamicum
MADFNRSELDSPLFGSRKRFKFDDDTIGAYAEKVARFFGTGQYLFWQTIFVVVWIFLNIGGWAWSWDPYPFILLNLAFSTQAAYAAPLILLAQNRQEDRDKHTILADRRRAEETKADTEFLARELAGVRLALGDTVTRDYLRHELEDLRGLLDRIEAKLDDEAASRIADRHEQHGSGPQDLSDPTQGDVADEF

SEQ ID NO: 2561 - DNA, 1221 bp, Corynebacterium glutamicum
  CDS (101)..(1198): RXA02070
agcacggatcaggacctcaagatttgtctgaccccactcagggtgatgttgcagacgaattttagggagtatcaaaacttgggactactatcgatacgtgatgactcaagtaaccgaatccgctgtccgcagcgcgctatcccgcgtagaggatccagagatcggtaagcccatcacagagctcggcatggtcaaatcagtgtccatcgacggctctgatgtccaggtggaggtctacctgacgatcgcggcttgcccgatgaaaaccaccattgtcaccaacactgaagcagctctcaaagacatcgacggggttggccaagttcatgtcaccaccgatgtcatgagtgatgaacagcgccgtgcgctccgcgtctccctgcgcggtgaaacttctgagccagtgattccattcgctcagcctggttccactacccgcgtttacgctgttgcttccggcaaaggtggcgtaggaaaatcctccatgacggtgaacttggctgcagccctagccaagcgcgggctgtctgtgggaattttggatgccgatatttacggacactcagtgcccggaatgctcggctcggaccaacgcccacaccaggtcgatgacatgatcatgcctccccaggcgcacggcgtgaagatgatatccattgctcacttcaccgaaggaaatgctcctgtggtgtggcgtggaccaatgctgcaccgtgccatccagcaattcctcactgacgtgttctggggcgacctggatattttgctgctggatcttcctccaggaactggtgacatcgccatcaccgttgcccaattgatcccgaatgctgagttgctcattgtgaccactcctcaggctgccgcagctgaggttgccgagcgagcaggaacgatctctgtgcagaccaaccagaaggttgctggcgtgattgaaaacatgtctgccatggtgcttcctgatggcaccaccatggatgttttcggcaccggcggcggtcaaaagattgctgatcgtcttaccgctgtgacaggtgaagaggtcaaggttatcggatctgttccattggatccgaacctgcgtatcggtggcgatgtgggaaatcctattgcgatttctgaaccacactccccaaccgctgcagcgatcaatgagatcgctgaacacctagctcaccgcaaggtatcgcccaccaaatgacccagaaccacaccgcaaac

SEQ ID NO: 2562 - protein, 366 aa, Corynebacterium glutamicum
MTQVTESAVRSALSRVEDPEIGKPITELGMVKSVSIDGSDVQVEVYLTIAACPMKTTIVTNTEAALKDIDGVGQVHVTTDVMSDEQRRALRVSLRGETSEPVIPFAQPGSTTRVYAVASGKGGVGKSSMTVNLAAALAKRGLSVGILDADIYGHSVPGMLGSDQRPHQVDDMIMPPQAHGVKMISIAHFTEGNAPVVWRGPMLHRAIQQFLTDVFWGDLDILLLDLPPGTGDIAITVAQLIPNAELLIVTTPQAAAAEVAERAGTISVQTNQKVAGVIENMSAMVLPDGTTMDVFGTGGGQKIADRLTAVTGEEVKVIGSVPLDPNLRIGGDVGNPIAISEPHSPTAAAINEIAEHLAHRKVSPTK

SEQ ID NO: 2563 - DNA, 930 bp, Corynebacterium glutamicum
  CDS (101)..(907): RXA02080
cgtaaattcgaagcgagcttctaattctagcaagcttggtgatggagtatcctgccaaaatttgtcctgttgcttattgtgcaggaattcggaggcggacatgtcaatcgagtggttacaaattgttgaattaggagcgatctttggtgcaggtttcctcgcaggaagcatcaatgtaattgtcggagcaggaacattagtgtcgtttcctattctcgtgttcctgggccttccaccgttgactgccaccatcgccaacaccatcggcatcgttcctggaagtatttcgggtgtggttgcttatagacgtgaactacacgcccatgtaaaaaccatcagatttctgctgccagcatcaatcctcggagggatcaccggcgcctcgctcttgctgcatttctccgcagatgtttttacagcagtaattccctggctgattggattcggcacgctgttggttatcgcaggtccatcaattaagaagcatgttggcgctcatacttcaggtggcatctctgctgggtttaggcaattgcctttcccgagccgaaccaccttcatcgtctcagtatgtggtgccctgttgctgggcatgtatggagggtacttcagcgcagctcaaggcattcttctcatcgcattgcttggcatcacatcaacgctgcagatgcaggaactcaacgccatcaaaaacctcacagtggcggcagttaatctcatcgcagccagtgtttttataatcatctcccctgagttgatctcctggccgaccgttgccttaatcgcgcttggctcagctttaggtggatacatcggcggacggtacgcccgccgacttcgccccagtgtttttagagcatttgtggtcatcgtcggaatcaccacggtcatcgttatgacgatcggttaatgcagcagactagtaacccc

SEQ ID NO: 2564 - protein, 269 aa, Corynebacterium glutamicum
MSIEWLQIVELGAIFGAGFLAGSINVIVGAGTLVSFPILVFLGLPPLTATIANTIGIVPGSISGVVAYRRELHAHVKTIRFLLPASILGGITGASLLLHFSADVFTAVIPWLIGFGTLLVIAGPSIKKHVGAHTSGGISAGFRQLPFPSRTTFIVSVCGALLLGMYGGYFSAAQGILLIALLGITSTLQMQELNAIKNLTVAAVNLIAASVFIIISPELISWPTVALIALGSALGGYIGGRYARRLRPSVFRAFVVIVGITTVIVMTIG

SEQ ID NO: 2565 - DNA, 1752 bp, Corynebacterium glutamicum
  CDS (101)..(1729): RXA02081
cctggatgatgtcactgtcttaaatccggtatacgcagatgatttgtgggaagatccggaagctcaacataattttgcggtgccaccggtacaaaaacatatgacgttaagtggcttggagcttttagagttcgagcgtcgaacagctgcgatggaaaccaggcttggtcggcataatcggggagcgggtggcgcatttcctgaggcggtggtgtctcgaagcgtggagttgccactttttgtacaggcccggaatttcctcaacaatcagcagatcagagctcaagtgcatcgccgtattttggagcagcttccaaccgagggagagattgtgctgttggggcacagtttggggtcggtaattgctgcagaccttttgaggcgattgccgccagagcttacggtgaagggatttgtcaccatcggtagtccgttggcaaatggtcaattcaatgtggatgatttgtttaagttgctgcgcacgccgttgagcaatgtgtcgtggtgggtgaatttttggagtggatctgatcctgttgcagcaaaacgcggagtgtcggtggctgttccgtgggtattggattttcgtgtgaaaacctcactggtcccaggccctgggcattcttcgcgggaatactgtgccaatgatgcagtggcggaagcaattgggtttgggctgttcggatcgcgcagcaaagaaatcgtccttgcggagaaaaatctgcagattccgctcaatgacgcggagatttttgtgctgcaggcgctgcgttattgttacctcattttgcaacggctcaaaggcgatgaagccttaaggtatgagtacgcacttcgggagactcaggatcgcctgattgaggagattaaatccagaaacgccgaagagggccggccgattccgaaggaaatcgcacgcctggattttgataacggtgatccaaacgcagcagctcctgttccaggtttgagcccatttatgcccaaagagcaggcaattgagcggcttttagagatcattggacagaacctgctgctgccttttgagatcgaggtgccggagaaaattcagcgggaagcactgagggatttcacggcggaaactcaattgggttccaccgtgggcgctgatatttttgatgcattgcaaatggctgttggggtggtgtcgggaagcgcgaagagcaattggcgcaaatggggagcgtttggtgtgggggctgcagctttgaccgctgcaacgggtggtttggctttggcggctgtgccgactgttgctggagtagccactgttgcctcgacactcgcagcatttggtccaggtgggatgatgggcggtttggtcactgcaggaacactgctcacagttggtggcggcagtttaaccgctggggtgttgagctcggtgaacaccacggaagagatcgaagcgctcgttgtacagaagctaagtttggctattttgtggcagcgccatgagatagatagaactcatgaggtgtgggaagaattcgcggaggcagaacgtctgattgtgcgggagcacacgcgtgtgaaaaacgtgtcggatagttcttcgcccattttgaaagctttcgagcagcagcgttcgactattgagcgggcgttgaagtatttgagcgatcatgggatggaacctggctggtttgaagaactggaaccaccagccccaacaccgtttctaaaactgcgggctaagaaaactgattaggagaaacacaatggagaaag

SEQ ID NO: 2566 - protein, 543 aa, Corynebacterium glutamicum
MTLSGLELLEFERRTAAMETRLGRHNRGAGGAFPEAVVSRSVELPLFVQARNFLNNQQIRAQVHRRILEQLPTEGEIVLLGHSLGSVIAADLLRRLPPELTVKGFVTIGSPLANGQFNVDDLFKLLRTPLSNVSWWVNFWSGSDPVAAKRGVSVAVPWVLDFRVKTSLVPGPGHSSREYCANDAVAEAIGFGLFGSRSKEIVLAEKNLQIPLNDAEIFVLQALRYCYLILQRLKGDEALRYEYALRETQDRLIEEIKSRNAEEGRPIPKEIARLDFDNGDPNAAAPVPGLSPFMPKEQAIERLLEIIGQNLLLPFEIEVPEKIQREALRDFTAETQLGSTVGADIFDALQMAVGVVSGSAKSNWRKWGAFGVGAAALTAATGGLALAAVPTVAGVATVASTLAAFGPGGMMGGLVTAGTLLTVGGGSLTAGVLSSVNTTEEIEALVVQKLSLAILWQRHEIDRTHEVWEEFAEAERLIVREHTRVKNVSDSSSPILKAFEQQRSTIERALKYLSDHGMEPGWFEELEPPAPTPFLKLRAKKTD

SEQ ID NO: 2567 - DNA, 468 bp, Corynebacterium glutamicum
  CDS (101)..(445): RXA02084
cgttgatggttgggtggtgggtcacagtttagaaaaagtgacttcaaatcacgtcgaaaagaaattgaaagtacttaagaaacatgtcacgctaggagacgtgataatcattgcaagcgttgttttcctcctcgttggcgcaatgttggcgaatgctgccgctgcgctctttagtgccagcgagccattcggacgaatttcctacctcattggcctacctaacgaagacgacttcgtgccgtactcactacggttcgtggcctttttcccactgatgctctccgcatcgatggcagcatccttcttcggggtgtgggcagtactaatcattcctttcggttacttcccatcactgatgatggttcataagcacaacaagcaggtacagcgaacctgggattccgtcaccgttgctgacttctacgaggattccacccctctggtctaatttcgatttctaaatgtcat

SEQ ID NO: 2568 - protein, 115 aa, Corynebacterium glutamicum
VIIIASVVFLLVGAMLANAAAALFSASEPFGRISYLIGLPNEDDFVPYSLRFVAFFPLMLSASMAASFFGVWAVLIIPFGYFPSLMMVHKHNKQVQRTWDSVTVADFYEDSTPLV

SEQ ID NO: 2569 - DNA, 594 bp, Corynebacterium glutamicum
  CDS (101)..(571): RXA02089
ctagctgaccagtattaataccaataatagaacatattatcgaacaatgtcgcttgggtgctctacacttcccactatgatcaaacaccgaaaccgcctaatgtcttccatctactccgcaactcgctacgccgcccacttcaaaagcgtcttccccaccgccctggatgacattcaatccatgatgcgccaccctcgatcactggccagagccatacccacgtggcgcccgccgagcatcccgctaccgtcacttcccggcgaagatcccctcaccctcaccttgtcacgtcaccgcgcaggccccgccgcccgccaaatcatccgcgagttcggtgagcaacgtgaacccgcctatctcatcaccatccgcatcaccagcccagagggcttcaaagtatccacccgcctcgccgaaggctggatccgcgcaattctcagcaccgcgcacagcggcactgtccaccagctcaccgatgagccggcaccgacgttttgctggcttgtcgacgcccactttgatccggtgcgttccccttccttccttttcgaatattccaaaagtgcagcctagaaaatgacgaaaccctggat

SEQ ID NO: 2570 - protein, 157 aa, Corynebacterium glutamicum
MSSIYSATRYAAHFKSVFPTALDDIQSMMRHPRSLARAIPTWRPPSIPLPSLPGEDPLTLTLSRHRAGPAARQIIREFGEQREPAYLITIRITSPEGFKVSTRLAEGWIRAILSTAHSGTVHQLTDEPAPTFCWLVDAHFDPVRSPSFLFEYSKSAA

SEQ ID NO: 2571 - DNA, 924 bp, Corynebacterium glutamicum
  CDS (101)..(901): RXA02090
aggtgaaaggctaggcgcggattcgttgtggacgctaggcttgtcggcagtgtctttgggggacgtccccagcacaaaccagatggaaggtcatcagaacatgagcttttttgaggacatcgcggctggacttgatagtgacggtatcgagtcccgcgtaaacggcgacacaatgttcgttccgatcacctctgacttggaaatccagttcgtggagatcgattccctcctacctgcagcaaacgtttatatcgctgcagccaatgttgatgaagacgatgatgagttcgaggcagttctcgtttcggtggtgttctctgttgaggatgctgtcgctgctgtcgcaaagcatgttgctactgatcaggtggtgactgtgctgcgtgatctacttgaaggaactgatgaacgcatccaggatttggagtttttccaggatgcagtgaatgcaaatttggttcgtgcggaagtcggccagaattctgagcttcaggttttggtcgaggttgaagacggcgtcccaaccgcaacggtcaatttcatcgcgatcggtgagtcctttgaagatctgattgatcaggccattgaagaattgtgggaatccgacggcgacgcagttctatcggatgaagatcgccaacgcatgttcgctgatttgacctccgagttggaatttgtcactgatgaagtcctcgacttgggtaccttcactgattttgatcgacttttcgatatcctttccctcgccgatgaccaggctgaggattgggaagcacagctcgttccttttgaggacgaggaatttgatgagccggatgtttatgaccttttcgtcgatgactctgaagaagatgacgacgacctcgatgatgacgaggacgatgaggatgatgacgaagactagattttagcctttgtcgcggt

SEQ ID NO: 2572 - protein, 267 aa, Corynebacterium glutamicum
MSFFEDIAAGLDSDGIESRVNGDTMFVPITSDLEIQFVEIDSLLPAANVYIAAANVDEDDDEFEAVLVSVVFSVEDAVAAVAKHVATDQVVTVLRDLLEGTDERIQDLEFFQDAVNANLVRAEVGQNSELQVLVEVEDGVPTATVNFIAIGESFEDLIDQAIEELWESDGDAVLSDEDRQRMFADLTSELEFVTDEVLDLGTFTDFDRLFDILSLADDQAEDWEAQLVPFEDEEFDEPDVYDLFVDDSEEDDDDLDDDEDDEDDDED

SEQ ID NO: 2573 - DNA, 774 bp, Corynebacterium glutamicum
  CDS (101)..(751): RXA02091
agatctagccaacgaacttgatttcatcgagccggaagagacagaagaagagcagcaattgaagtggcttagccttatgcagttttttggaagtagataaatgagcatctggaaacgtctgttagtgcagtacccgcgcttcgccgacaccctcacagccggccaacccatcacgctcgaggaattagcaaccccggaagtgatcttggaagctgttgccaaaggccaagaaattttcggcattgagcagccaaaacatgcagcacaactctggtttcactccctgtgcaccgcaattgtcggccccgccgtcaccgccatggtggaattcgatgtcatccccagcctcgacatacgtcgaggtcagctgcataacatcgacggttactggttcggcttcaggccggaggagatgcttgtcgacgcctccctccacctgtcgggcacccaattcggcgagagtatccgcgtggtgattgatgcattatgcgctgccacggatctgcgaccggcacccctgtgggcggttgcctcagatgcgttgggaatcgcagctagcggcgcaggtgtcgaggcctttgaagaagaacatgcccgcgaggtggcggaagccctcattgaaggaatgaatagtgtgaactcagttccatcgccgcggtttaacgacgacgattatttcattcgagctggatgctgcatgattttccactcaccacgagctgatttttgcacgtcgtgcccacagaagaggtgaaaggctaggcgcggattcgt

SEQ ID NO: 2574 - protein, 217 aa, Corynebacterium glutamicum
MSIWKRLLVQYPRFADTLTAGQPITLEELATPEVILEAVAKGQEIFGIEQPKHAAQLWFHSLCTAIVGPAVTAMVEFDVIPSLDIRRGQLHNIDGYWFGFRPEEMLVDASLHLSGTQFGESIRVVIDALCAATDLRPAPLWAVASDALGIAASGAGVEAFEEEHAREVAEALIEGMNSVNSVPSPRFNDDDYFIRAGCCMIFHSPRADFCTSCPQKR

SEQ ID NO: 2575 - DNA, 3495 bp, Corynebacterium glutamicum
  CDS (101)..(3472): RXA02097
ttggctacagatgtttcagcgcttgcagtggggtagtgtgtttaaacatcacaattagttctagaggaaaacgcattttttgcgcggggagagtgtatacatgccggctggcatcgcagacatgacagattcattgctcggatgggcatcacaaactgagctggatctgaaccagcgtcttgcaggggtagagtactttccacaaattcagctgcgacacgatgagctcgagcgcattcatcggttttacggcacctttttgtcccgccaggtaggcgcgggcgcaagccttggggatctttttgaaatgaccccatgcctgacagtcaccaccttggtgtctcgggcgtcacggatcagcgatccagcagatttcttcggtgaatacatcggaggactgggacttagcgcagaacacgcagcagttgttgaagggttgaccgaaaagctcttcgcacaggctggcctgctcgttcctgagggaattgcatctccattggagttgttatccatccacgcaggcattagtaaccacgaagtggccgcagtgctgaccgaagtggaaaacggcaccaccgaatatccattcatgttcgacgctgtcctgcgcctaacccctgagtgggcacagacccttatcggcggagttcaagaactcattgaatttgccaccacccaccgaacttcttggtcagaccgccagcgcgaatcctcactgccagccatgatcgatgagatcgttgtggcggaacttcgggaacgcccagttggtactgccgaccgtgaaaactccgttggtgtggcacttcgtgagcttcgcccacgcctcatcctggatgcagaacgccgcaaagtctgcctgcgtctacctgaacagcgcgtcagcgacgatgaaatcaactggcgagtcagcctagaaggcaccacccggattttctccacccgccgagcatggggcgatacttctggatactccgaagccctcgacatcactgtcgagcgtcaaatccgcgaaaccaccgtcaccgacacctcaaaccaaatcacctgggttgtcccagtcgtggacttcaacgacccagtgctggtgttttccgcgcgcggtgaaaacctcaccgacaaggtctccctgcaccatcaagagatttacgttctcgcgccagcggaagcaaaactcgaagacatggtcactggccagccagtaccagttattgagcaattcctcgtagagggctggaactcatgggtgtgctcccgcgtggacgcccgtggcctgtcctctctgaaggtcaacaaagaagtccgatgcattgacccacgtcgacgcgttgccttccaccacccagccgaattggtccctcacgtacgatccatttccggactccccgtacacgcgcagtccctgatcgccgagttcccaccaaccctgagcggacaagacgaaacctggatgctctccatctcggctttcgcaggtgtaggcgctgctggtgaagaaatcgccgagccagagcctttggaagtccctgccgacggtggccttttcgccatcttcgacccagaaatatacgacgccccatgggtgggtgaatacctggtccgactccgcggcccacgcaatgaatccttccgacccgaattcgccatcgtcgaagacatgaccaccgaattcgaagtcgcctcaggtgcatcatttcgaatcccaaccaccactggtctcagcgaagccagcctacgcgtgcgttccggtgaaaagcacttcaccgcagagccacgcctggtcaccgttgaagcaaccgaccccaacgcatcattcgtggtcaccaccgatgaaggcgatcaaatgccattgcgatttgtgccaccacaaatcgccatcgaacttccactgaccaccgagccaccaacctggcgcgtcacccgtactgtctgtggaccacgcgacctcgacggtgcaggcgaactccgcatccgcaccggtgtcgatgtcggcgatccaaaggtcagtgtgcgcaaccaccacggttcaccactgcgaaccgtgaaaatggtcacccctgacaacggccgtacctggattgccagcatgaaggaaatcgcagccagtacctttgtgatgccacgcggatccatcgaatttgagtggactgaccgcaaggttgaccgtcgcgtttccgtgacgattgctgtcattgacaaaactgagaactttactggcatcaccatcgaagatggaaagctcgtattcgaagaactcgcagccggtcgccaactcgctgcatgggtgtggccacaaaccgcaccgtgggtaagcgcagtggaacttgctgtcaccggaccagagctggaactccctgaagttctcgtcggcgcaggcaacctgattgttcaactccacaccgctgacccattcactacctccgtgaccccactgtcaccaggaaaagctgcggtcaccgttgagcaagaaggctactactcagcacaaaccgaagaatatgcacagctttcagcattcttcggtggggaagtagaagaaccaccaatcagtgacgctgtggtccccgcactttgggatgtttcccatatctggaccgaacagggaaacaccgagcatcttccagtagtccatgccgccctgcgctcctcaccagccgcagcactgaagggtctgtccgcttcgctggttcccgcacaggcactacctggaaaagtcatttcctccggactggcagcctcaccgttcaccacggaatcaccagcaacagaagtgcaccgcaccgcatggatcggaaccctgcaactcctgggtgcactgccaagcgcattcaaggaagccgaagagcttggcaaccgcacaccactgctgccaatcctcggacaacttgaggaagtcgccggcaagaacatcctgtccacccttgcaactggccgtgactccactttggacaccgcatgcatcgaccaatccaccgttgcgattgccggcatgaacgaaacccagcaaaaagccctgctggacatgttcttcagcaacgccgacatcgttcctggaccactaatggaagacaacacccgcctcatggcagtgttcgaaaccttcaagaagcgcgatgcactccgtgaggttctccagactgaaggcttgattaagaccgctgtagaacttcttcgtgccatgcgtggaacccagcgtcagctgtattcctccgcacgtattcgattcgacaagctcgatggtgtcaacactgacaacccagaaaacatgtgggcactcaccccagttgtgtcactggtgttcgcgttgtcatcccgtttgcatgcacacgaattgatcggcaagacccgaactctcgatcgtgcatctgccggttggggtcgaatcgctgatctggtgccagaccttgtcaccggtgacttgatctccgcggaggcaatggttttgggagctcgaaacccaggactcgtcgattagtccctgatttcatcggaggg

SEQ ID NO: 2576 - protein, 1124 aa, Corynebacterium glutamicum
MPAGIADMTDSLLGWASQTELDLNQRLAGVEYFPQIQLRHDELERIHRFYGTFLSRQVGAGASLGDLFEMTPCLTVTTLVSRASRISDPADFFGEYIGGLGLSAEHAAVVEGLTEKLFAQAGLLVPEGIASPLELLSIHAGISNHEVAAVLTEVENGTTEYPFMFDAVLRLTPEWAQTLIGGVQELIEFATTHRTSWSDRQRESSLPAMIDEIVVAELRERPVGTADRENSVGVALRELRPRLILDAERRKVCLRLPEQRVSDDEINWRVSLEGTTRIFSTRRAWGDTSGYSEALDITVERQIRETTVTDTSNQITWVVPVVDFNDPVLVFSARGENLTDKVSLHHQEIYVLAPAEAKLEDMVTGQPVPVIEQFLVEGWNSWVCSRVDARGLSSLKVNKEVRCIDPRRRVAFHHPAELVPHVRSISGLPVHAQSLIAEFPPTLSGQDETWMLSISAFAGVGAAGEEIAEPEPLEVPADGGLFAIFDPEIYDAPWVGEYLVRLRGPRNESFRPEFAIVEDMTTEFEVASGASFRIPTTTGLSEASLRVRSGEKHFTAEPRLVTVEATDPNASFVVTTDEGDQMPLRFVPPQIAIELPLTTEPPTWRVTRTVCGPRDLDGAGELRIRTGVDVGDPKVSVRNHHGSPLRTVKMVTPDNGRTWIASMKEIAASTFVMPRGSIEFEWTDRKVDRRVSVTIAVIDKTENFTGITIEDGKLVFEELAAGRQLAAWVWPQTAPWVSAVELAVTGPELELPEVLVGAGNLIVQLHTADPFTTSVTPLSPGKAAVTVEQEGYYSAQTEEYAQLSAFFGGEVEEPPISDAVVPALWDVSHIWTEQGNTEHLPVVHAALRSSPAAALKGLSASLVPAQALPGKVISSGLAASPFTTESPATEVHRTAWIGTLQLLGALPSAFKEAEELGNRTPLLPILGQLEEVAGKNILSTLATGRDSTLDTACIDQSTVAIAGMNETQQKALLDMFFSNADIVPGPLMEDNTRLMAVFETFKKRDALREVLQTEGLIKTAVELLRAMRGTQRQLYSSARIRFDKLDGVNTDNPENMWALTPVVSLVFALSSRLHAHELIGKTRTLDRASAGWGRIADLVPDLVTGDLISAEAMVLGARNPGLVD

SEQ ID NO: 2577 - DNA, 1281 bp, Corynebacterium glutamicum
  CDS (101)..(1258): RXA02102
cggtaaaacgtcccgctagtgcgatggaatctgtgtcggggactaaaacatcaaactgaatcttcggcataacaccacagtagacaatagccttggtgttatgactagcccccattctttttctgtcacccccattcgcaccatggctgacggcacgatcaaacagattcaccctttcacaggcaccgaagtgtggacggtccctgggcgtggaaatcgacctctgtcacatcccgcttctacgatcgtcgaactatctgcacacgatcacacctcttactgtgcattttgttccgacaatatgctctccactccgcctgagaaatcgcgcatcatcattgatagctccggcgactttgacatccttcccggagcattgcctggtgagctttcagaaaccactccggaatttcgacgagtccccaatctgtttgagattgtctcttttgactactggcaccagaattttggtttcgatatggattcagaaaccgccatgcgcatggcgcaatacttggcgattccagaaggtcgcgaacatgttttagccattgtgcgcacccgactttctgccgctggtgaagatcccgcgcacatgaccgatggcgagttgttagaaaaagctcccagctactttgctggtggtcatgacgtcatcatcggacgccgacactttgtcgatgacgcaaccaccagtgatcaattggcctcatctggaacactgaccgttaaagagcatgaggcgttcatccgcctgactgtcgatggcatcagggatttgtaccaccgcaaccgttacgcaccgtatgtagtggcgtttcaaaactggttgaaacccgccggcgcgtcttttgaccatcttcataaacagctcgtcgccattgatgaacgcggccgacttattgccgatgaactgcatcatctacgtggcaatcccaatatgtacaacgaacttgctgttgattacgccggataccacaacctgatcatcgcggaaaacgatcacgccgtggccttcgcaggtttcggtcaccgctaccccaccattgagatttactctaagtccgctattcctgaaccctggcttcaaagcgacgaggaaatccaagcgatgagcaacctcatccatgcatgccatgctgcaaccggcgcagatgtaccctgcaatgagggatgggtacacaaaccaatcgatgttgatatgccaatgccctggcatgtgatgatcaaatggcgtgtttctaccctggcaggtttttgaaggtggcaccaaggtgtatc

SEQ ID NO: 2578 - protein, 386 aa, Corynebacterium glutamicum
MTSPHSFSVTPIRTMADGTIKQIHPFTGTEVWTVPGRGNRPLSHPASTIVELSAHDHTSYCAFCSDNMLSTPPEKSRIIIDSSGDFDILPGALPGELSETTPEFRRVPNLFEIVSFDYWHQNFGFDMDSETAMRMAQYLAIPEGREHVLAIVRTRLSAAGEDPAHMTDGELLEKAPSYFAGGHDVIIGRRHFVDDATTSDQLASSGTLTVKEHEAFIRLTVDGIRDLYHRNRYAPYVVAFQNWLKPAGASFDHLHKQLVAIDERGRLIADELHHLRGNPNMYNELAVDYAGYHNLIIAENDHAVAFAGFGHRYPTIEIYSKSAIPEPWLQSDEEIQAMSNLIHACHAATGADVPCNEGWVHKPIDVDMPMPWHVMIKWRVSTLAGF

SEQ ID NO: 2579 - DNA, 519 bp, Corynebacterium glutamicum
  CDS (101)..(496): RXA02103
gaatctgtttgatcgtgccgtcagccatggtgcgaatgggggtgacagaaaaagaatgggggctagtcataacaccaaggctattgtctactgtggtgttatgccgaagattcagtttgatgttttagtccccgacacagattccatcgcactagcgggacgttttaccgtagtcgccaaccttttgatcgaaaaaggcctcatggatcatggcgttgttgtccatgatccagcagcgaaaatcgcagaagctgtggaagagcagcttcgccagacttaccgcgacgagcatgaagatgcagacttggaagaatcctcggtcaaccgttacctcattgaagttgatggagttaaaggctccgttaaccaagtgaccatgatttttgcccgtttgctcaccccgccagcagagttgccaaaggacgctttcctcctggagcaggaacttgcctatgaagttcctgcagtctacccatggactgtggagatccttcgctagttttgagctacgtattcttg

SEQ ID NO: 2580 - protein, 132 aa, Corynebacterium glutamicum
MPKIQFDVLVPDTDSIALAGRFTVVANLLIEKGLMDHGVVVHDPAAKIAEAVEEQLRQTYRDEHEDADLEESSVNRYLIEVDGVKGSVNQVTMIFARLLTPPAELPKDAFLLEQELAYEVPAVYPWTVEILR

SEQ ID NO: 2581 - DNA, 1044 bp, Corynebacterium glutamicum
  CDS (101)..(1021): RXA02109
gactctaagggaagtgtttcgcttcaacccgtacaggtctaatatgtcgggagtcttgttttaagctcttatataacctgtataggaaagcgaaaacctcatgcttgcagtgctattcggggtggtggccggtgccatcatgcctttccaaacttcggtgaataatagattgcgtcagtccgtgggagcaccactgctggcgtcttttatttcctttttggtaggaactttttcactcctggttgcaacgtggatcaccagtgggcacccgtatcctgctctaggaaatacaactggccaaccgtggtggattttcaccggtggcatgttgggtgttgtgctgctgacgggaaacattttgctgtttccccgagtcggcagcgtgcagaccgttattttgcccatctccggacagatcatcatgggcctaattatcgatacaactggcctggcacattcgcctcaagcaccgttaaccctgttcagagtattgggtgctgctgcggtacttgttggatcgctggccgcagtgggagtgttctctaagaaaaacatcggacagacccaatcccaaggtgcctccatttggttgtggcgcctcttcggagtggtgatgggcatgtgccaagcaacccaggttgcagtcaatggttacttgggaactgtcctaggatcccccattgagtcagcactggtgtctttcgctgttggcaccaccgcgctgtttattctgctgttggtcacccgaaccaagtggcgtggaatcaacggcgctgggaagaaaaacccatggtggatgtggatcggtggcgtcatcggcgcgactgttattttcagtactgcttacctgggaccgatcattggcactggtgttaccgtggtggttatgttgctgggcatgatgttggccagcctgatgatcgacgcttttggaatccttggcagcccgcgccgccacattcacatcgcgcagcttctcgggctcgtggtgatcatcctcggcgtaacaatgatcagaatctaaaccaagaatctaaaccaaga

SEQ ID NO: 2582 - protein, 307 aa, Corynebacterium glutamicum
MLAVLFGVVAGAIMPFQTSVNNRLRQSVGAPLLASFISFLVGTFSLLVATWITSGHPYPALGNTTGQPWWIFTGGMLGVVLLTGNILLFPRVGSVQTVILPISGQIIMGLIIDTTGLAHSPQAPLTLFRVLGAAAVLVGSLAAVGVFSKKNIGQTQSQGASIWLWRLFGVVMGMCQATQVAVNGYLGTVLGSPIESALVSFAVGTTALFILLLVTRTKWRGINGAGKKNPWWMWIGGVIGATVIFSTAYLGPIIGTGVTVVVMLLGMMLASLMIDAFGILGSPRRHIHIAQLLGLVVIILGVTMIRI

SEQ ID NO: 2583 - DNA, 597 bp, Corynebacterium glutamicum
  CDS (101)..(574): RXA02117
tgaacacaaactaccacgtttattgcatcatgcaacacccttgctaggatataaaatactctatgagtccagacgtttttaaagggagcgaattaccatagtgtctacagatccagaagagttcgaccaagctgaaaccctcgatcaactcgcgtatgagatcatcctgctcacccggtatggtgtccaaaacacaccgaccaacaagcgcgaagccatcatggatcgcagcgccctcatcttgctcacccgccttgacgctcaaggacctatgacagttaatgagctagctgaaagctttggacttaacgtttctaccgtgcaccgccaactcaaagcagccattgccaatggcttaattgaagtcgtcgatgatcaagcatgccccgctaaacttcatcgtccaactgagttgggtaaagaaaaactgcagcaggagcttcttgcccgccagcaggatctcacccgcattcttcatgattgggatgaggaagacattaaaacgcatgccaagctattgcggaagcacaatgaaagcttggaagaatacctcgatatgaagtggccccgcccctaagtgcccataaacgcacctct

SEQ ID NO: 2584 - protein, 158 aa, Corynebacterium glutamicum
VSTDPEEFDQAETLDQLAYEIILLTRYGVQNTPTNKREAIMDRSALILLTRLDAQGPMTVNELAESFGLNVSTVHRQLKAAIANGLIEVVDDQACPAKLHRPTELGKEKLQQELLARQQDLTRILHDWDEEDIKTHAKLLRKHNESLEEYLDMKWPRP

SEQ ID NO: 2585 - DNA, 1494 bp, Corynebacterium glutamicum
  CDS (101)..(1471): RXA02123
ggattgagtcttttcggcagctgcgtgtgaacccggcttcatgacatgcagcatacctgtgcgaaaaattcctgaccgcccacttaaaaaaaggtctagggtgtggggtgtgagtcttccaccaaatgtacaaactgtcggtgagctgaaggccgccggccacatctaccgacctttgcgcgtagaaatccgcgacaacctcctagccaaacttcgcagcggcgaagatccgtggccaggcctgcacggcctgaactacacggtcatccggcagcttgaacgcgcgctcatcgccggccacgacatcgtgctgctcggcgaacgcggccagggtaaaacccgcctgctccgcacgttaataacgcttctcgacgagtggtccccgatcattcccgggcgcgacgttccagaacaccctcttgcgccaaacgtagagatctccgatgatcagcccattgaatgggtacaccgcgatgcgcgctataccgagaaacttgccaccccagatacttccgtggctgatcttatcggtgatgttgacccaatgcgtgttgctgaaggccgcagcctcggtgatctagaaaccattcactacggtctgattcctcgcgccaaccgtggcatcgtggcgatcaacgagcttcctgacctcgctgaacgcatccaggttgccatgctcaacgtcatggaggaacgtgatgtgcagattcgtggctacaacattcgtttggacttggatgtgctggttgttgcctcagccaaccctgaggattacaccaaccgtggccgaattatcactccgctcaaagaccgcttcggtgcagaaatccgcacccactacccacttgagttggacgatgaagtggcaattatccgccaggaagcagagcttgttgcgcaagtccctgatatcttggttgaaattcttgcccgctacacccgagcgcttcgtgaatcctcatcggtgaatcagcgttctggtgtgtctgctcgtttctccattgcaggtgcagaaactgtggccgcagcagctcttcgacgcgcagcagtgttcggcgaagatgaggccgttgcccgcctggttgatttggaagcagccgtggaagtcctcggcggcaagattgaatttgaatccggcgaagaaggacgcgaatgggaaatccttgattatctcctgcgcaccgcaaccgcagaagcgctgcgttccactctgcgctcgctggatctcaccccgctcatcgcagcattagacggcagcatcaccgtttccactggcacgaacatcaccgcgtcagaatttttggcttcgctccccgaactcggcgaaagcacgctatatgacgacatcgctcaagcttttggtgccaccacaccaagtactcgcgcgatggccattgagcttgctttggaaggtctttacctttcccgaaaaattgccaaggattctggcgaaggtgaaaccatttacggttaactggttttaaggagcaccac

SEQ ID NO: 2586 - protein, 457 aa, Corynebacterium glutamicum
VWGVSLPPNVQTVGELKAAGHIYRPLRVEIRDNLLAKLRSGEDPWPGLHGLNYTVIRQLERALIAGHDIVLLGERGQGKTRLLRTLITLLDEWSPIIPGRDVPEHPLAPNVEISDDQPIEWVHRDARYTEKLATPDTSVADLIGDVDPMRVAEGRSLGDLETIHYGLIPRANRGIVAINELPDLAERIQVAMLNVMEERDVQIRGYNIRLDLDVLVVASANPEDYTNRGRIITPLKDRFGAEIRTHYPLELDDEVAIIRQEAELVAQVPDILVEILARYTRALRESSSVNQRSGVSARFSIAGAETVAAAALRRAAVFGEDEAVARLVDLEAAVEVLGGKIEFESGEEGREWEILDYLLRTATAEALRSTLRSLDLTPLIAALDGSITVSTGTNITASEFLASLPELGESTLYDDIAQAFGATTPSTRAMAIELALEGLYLSRKIAKDSGEGETIYG

SEQ ID NO: 2587 - DNA, 2079 bp, Corynebacterium glutamicum
  CDS (101)..(2056): RXA02124
gcttgctttggaaggtctttacctttcccgaaaaattgccaaggattctggcgaaggtgaaaccatttacggttaactggttttaaggagcaccacagccatggccacttcacattcacgaccccgccgcagccgttacggacgctacaccggaggcccagatccgctggcacctccagtggatctcagcgatgccctgcgcgatattgctgatgatgtcatggctggttattcccctgagcaggcactacgtgaatacctgcgcagaggcgcccgaggacaggaaggcctcgatgatctagcctggcgtgcagccgaacgccgccgagaattacttagccgaaacaacctcggtggcacactcgctgaggttcgcaagcttctcgatgaaggcctcaagctggaacgcgctcaactggcccgcgatatcgatatggatgacaccgatcgagcattccgcgaaatgcagatcagcaacctccctgaatccaccgccgctgccgtttccgagctaaattcctacgattggcaatcccaagaagcacgccaaaagtttgaacaaatccgtgacctgcttggccgtgaaatgttagatcagcaattctccggcatgaaacaagccatggaaggtgcctccgacgaggacaaagcagccatcgccgaaatgctgcgcgatctcaacgacctgctctccaaacaccgcgagggaacggacactcccaccgatttcgccaattttatggccaaacacggcgagcacttccccgagcagccgcgcgacatcaatgagctcatcgatgccctcgcagcccgttccgccgcagccagtcgcatgttcaactccatatcagaggaacaacgccgcgaactcatgaaactatctgcccaagctttcggatccccagagctgcaggaattgctcggtgacctggctggaaacctccaaggtctgcgccccgacctcaactgggatggctccgaacaattctccggcgacgaaggcatgggacttggtgatggcaccggcgccatgcaggacctcgccgaactcgacaaccttgctgaacaactgagcaactcccacaccgacctcgacattgatgcgattcgccgccaactcggcgatgacgccgctgtctctgccgaaactttggccaaactggagcgcgcgctccgcgacagcggccttcttcgccgcaaccccgatggctcattgaagctcagcccccaggccatgcgccgtctagggaaagcgcttctcgacgccgccagcgaacaattatcgtcccgcccaggctcgcgagactcccggttggcaggagcaaacggtgaagcgacgggagcatcccgaccttatgttttcggagacacccaaccatgggatgtcacccgcaccatcaccaatgctctgcagcgaacagccggaacagatacggaaggtccgctgcgcatcaacttagatgatgtggaagtcattgaaactgaagcccgcaccctcaacgccgtggcactgctagtagacaccagttattccatggctgccgaaggccgctgggtgcccatgaagcaaacagcgcttgccctccaccacctggtatccacccggtttagaggagatgaactagcactaatcacttttggtcgacatgcccaaaacatggacatcgaggaactgactgcactgccaccggttcacgaacaaggaactaatctccaccacgcattactgctggcagaacggttctttgctcgccatccctccatgaaagcaagcctgctcattgtcacagatggcgaacccacagctcacctcgaagccgatggacacgcctggttcaactggcccactgacccagaaaccatgttcaagaccgtcacccaactagataaagtaaccaagcgaggaacccacaccacactcttccgactgggacatgatcaaggattagagcactttctcaaccaactagccgaccgtgttggcggcaccgtggtggctcccgatctggacggactcggcgccgcagtcgtgggcgagtatttacgacaccgctactgagcattggacgttttcgcctt

SEQ ID NO: 2588 - protein, 652 aa, Corynebacterium glutamicum
MATSHSRPRRSRYGRYTGGPDPLAPPVDLSDALRDIADDVMAGYSPEQALREYLRRGARGQEGLDDLAWRAAERRRELLSRNNLGGTLAEVRKLLDEGLKLERAQLARDIDMDDTDRAFREMQISNLPESTAAAVSELNSYDWQSQEARQKFEQIRDLLGREMLDQQFSGMKQAMEGASDEDKAAIAEMLRDLNDLLSKHREGTDTPTDFANFMAKHGEHFPEQPRDINELIDALAARSAAASRMFNSISEEQRRELMKLSAQAFGSPELQELLGDLAGNLQGLRPDLNWDGSEQFSGDEGMGLGDGTGAMQDLAELDNLAEQLSNSHTDLDIDAIRRQLGDDAAVSAETLAKLERALRDSGLLRRNPDGSLKLSPQAMRRLGKALLDAASEQLSSRPGSRDSRLAGANGEATGASRPYVFGDTQPWDVTRTITNALQRTAGTDTEGPLRINLDDVEVIETEARTLNAVALLVDTSYSMAAEGRWVPMKQTALALHHLVSTRFRGDELALITFGRHAQNMDIEELTALPPVHEQGTNLHHALLLAERFFARHPSMKASLLIVTDGEPTAHLEADGHAWFNWPTDPETMFKTVTQLDKVTKRGTHTTLFRLGHDQGLEHFLNQLADRVGGTVVAPDLDGLGAAVVGEYLRHRY

SEQ ID NO: 2589 - DNA, 924 bp, Corynebacterium glutamicum
  CDS (101)..(901): RXA02125
gacctaaaattcatcacctcaccgtttttaaggcttagaaaaatagcagtgttgggatgtgaatatccatttatgctgctgtagtcggctatgtggacgcatggtggcaacctctcagtttatcgatgacagcgaggctgcccaggcggtacgcgcagctattgttgcaggataccgaaacattgatactgccctagcgtatggaaacgagcgcggcgttggcgaaggcattcgcaccgctggagtgccccgcgaggagctctttatttccaccaagctagctgcagaaatcaaagattacgatggagcagtcgccgcgattgatgagtctttggcgaaaattggcttggattatgtcgatctgatgctcattcactccccacaaccatggagtgatttccgtggtggggactattcagagggaaaccgtgaagcgtggcgcgcgctggaagatgcctacaaagccggaaagattcgatccattggtgtctcgaacttcctggaggccgatctggagaatatcttagactccgcgacggttgctcctcacgttaatcagcttcttgtgcatgttggaaacaccccaagcgagttaatcagtttctgcgattccaagggcattctggtcgaagcatattcacccatcgcccacggagagatgctgaagaaccagcaggtcaaggcgattgctgacaagtacaacgtgagcattccgcagctatgcattcggtacacaattcaactgggaacggtgtctttgccaaagactgccaacccagatcatatgagctccaatgcgcagatcgactttgaaatttccgaggaagacatggcggcacttcaagaagtgaccgcccgcgattatggcgagcacagcggttttcctgtgtattccggcaagtagaaagatttttatcatgggac

SEQ ID NO: 2590 - protein, 267 aa, Corynebacterium glutamicum
MVATSQFIDDSEAAQAVRAAIVAGYRNIDTALAYGNERGVGEGIRTAGVPREELFISTKLAAEIKDYDGAVAAIDESLAKIGLDYVDLMLIHSPQPWSDFRGGDYSEGNREAWRALEDAYKAGKIRSIGVSNFLEADLENILDSATVAPHVNQLLVHVGNTPSELISFCDSKGILVEAYSPIAHGEMLKNQQVKAIADKYNVSIPQLCIRYTIQLGTVSLPKTANPDHMSSNAQIDFEISEEDMAALQEVTARDYGEHSGFPVYSGK

SEQ ID NO: 2591 - DNA, 357 bp, Corynebacterium glutamicum
  CDS (101)..(334): RXA02129
tgttctgccgatccagcaccagctctggtggcaggagctgagagttttgccaattaacttggcgaacagacttgttggaaatgaatttgtcaagaatggcatgaagatcatcttcaaaatggctagtaacaagttcatcgacaacaaaaaggggctggctatgctagtttttgccgaacttgtgatggaaatgcttgatcagcctgaagaacaacttcataatgtgcgtggagtggctattgagaagcgggagttcctcaaagctctcaccgctgatttcaccagcagacttaaacaagctcaaaccgataagattcttgtttgggatttcgcatgactattatgtgggcgacccgt

SEQ ID NO: 2592 - protein, 78 aa, Corynebacterium glutamicum
MKIIFKMASNKFIDNKKGLAMLVFAELVMEMLDQPEEQLHNVRGVAIEKREFLKALTADFTSRLKQAQTDKILVWDFA

SEQ ID NO: 2593 - DNA, 739 bp, Corynebacterium glutamicum
  CDS (101)..(739): RXA02132
gcagcccaccgccagcgattcctcgccgaacaaggctacgcataccgcatcctcgacgccgacgacatcctcttcccactacccaagaaagagctataacgtgcacaacttctccttcgacgtggacgaatcctacgccaagaagaacaacgaaatcctccgcgacgcaaagcgactccagatctcagcactgtgccttggactcatcctcggcggcggagccgtagccgtctacctgttttctaacggagcagtgtggatgtggatgatcgccatcgtcatggtcttcctcgccctgttgagcttcatcatgattcctgtgatcccccgccaaatgggcaacgcacaaacgctctacgatgactacgaactagcccccgccatcatcgcagaagtaaacccccgcgatgtggtcctcctggcactcgtcaaccgcaatgtgaaccccgaagccaaaccagagtgggcattggccacccgcacgatcgttcgcgtcggagcacacgaacgtcgcctcggcgaacgtatcccatccgtcgcaatcaccggccgacgcaccgtcaaagaccaagaccactgggatgaaatcagccccatgccaattacctggggcaccacggacaaagacatcatccgtgaagccgagaaaactatcccccacgaactctgggccaaactagaaaagaaccgcggcaagttggaggacgttaaaaagacccccaacaacctgttcaaacta

SEQ ID NO: 2594 - protein, 213 aa, Corynebacterium glutamicum
VHNFSFDVDESYAKKNNEILRDAKRLQISALCLGLILGGGAVAVYLFSNGAVWMWMIAIVMVFLALLSFIMIPVIPRQMGNAQTLYDDYELAPAIIAEVNPRDVVLLALVNRNVNPEAKPEWALATRTIVRVGAHERRLGERIPSVAITGRRTVKDQDHWDEISPMPITWGTTDKDIIREAEKTIPHELWAKLEKNRGKLEDVKKTPNNLFKL

SEQ ID NO: 2595 - DNA, 921 bp, Corynebacterium glutamicum
  CDS (101)..(898): RXA02137
gcctactcaccgtccacagatgagtaaacccggaaaaacccgtatttagttattggttttacctgcgtgggctgaaagtcttcacttttaatccttacagatggtcgttctgattcctttcaacgatgaagtgtgcacccctattcccgatttgggaggttttccttgtagcctattgagtgtgaaacttccttgggataaaaataagaacaacgaaggggctgacgctgcaggccaagacgccagctccacccctgagaccgctacgcctgacgctactgagcagaaattgccaaaggggcacacggcaccgaagggccgtcccactccgaagcgtcgtgaagttgagttagagcgaggtgtcgttggcggccagtctttggcgcctactgatacttatgcgcagcagcgccagaagcgtaaagaatttaaagcttctatgaccaaggaagaattcaaggcatacaagcagaaagagcgcgatgcccgagttaagcgtcagcgcgaaacccaagctgcaatggatcgcggcgaagatgcttatttgatggatcgcgataagggcgaggttcgccgttttgcgcgtgactgggtggattcccgcaggttcttgtctaactttgtgatgccagtagctattgctttgctggttgtcatgctgatcggtaacttcaacccatcattcgctgcgacttcttccatggttgccatggttttgatgttgggcttcctgattgagggcatcaccactggtcgtcgtgtgaacaaggctgctcgcacgaggttccctggtaccaccgagactggttttggtctgggttactacgcgtattcccgcaccattcagcctcgtaagtggcgtacccctcgtgcacgcgttgaaattggtgctgaagtctagcgcatgcgcacgttagttct

SEQ ID NO: 2596 - protein, 266 aa, Corynebacterium glutamicum
MVVLIPFNDEVCTPIPDLGGFPCSLLSVKLPWDKNKNNEGADAAGQDASSTPETATPDATEQKLPKGHTAPKGRPTPKRREVELERGVVGGQSLAPTDTYAQQRQKRKEFKASMTKEEFKAYKQKERDARVKRQRETQAAMDRGEDAYLMDRDKGEVRRFARDWVDSRRFLSNFVMPVAIALLVVMLIGNFNPSFAATSSMVAMVLMLGFLIEGITTGRRVNKAARTRFPGTTETGFGLGYYAYSRTIQPRKWRTPRARVEIGAEV

SEQ ID NO: 2597 - DNA, 531 bp, Corynebacterium glutamicum
  CDS (101)..(508): RXA02141
gcccattcgtttccgatcgcaccgcaacccgcgacggcgaaaacactcagagcaacgcttaagaaggagtggcgaaaaaatgaagtcttcagcaaaactcatgtacggcccgaccgtattcatggccgcaatggctgtcatctacatcttcgcaacaatgcacgttagtgatggcggcagcgttaaaggtgttgagtgggtcggttctgtggccctggtcctgtcagcaggtctgacgcttatgctcggtgtctaccttcacttcactgaagtccgcgtagatgttcttccagaggactgggaagaggctgaggttgccgacaaggcaggaaccctcgggttcttcagcccaagctccatttggccggcagctatgtccggtgcggttggattccttgcattcggcgttgtgtacttccactactggatgatcgcagttggtctgatgctcctgatcttcacgatcaccaagctcaaccttcagtacggcgtgccaaaagaaaagcactagtactaaaaccacatatgctc

SEQ ID NO: 2598 - protein, 136 aa, Corynebacterium glutamicum
MYGPTVFMAAMAVIYIFATMHVSDGGSVKGVEWVGSVALVLSAGLTLMLGVYLHFTEVRVDVLPEDWEEAEVADKAGTLGFFSPSSIWPAAMSGAVGFLAFGVVYFHYWMIAVGLMLLIFTITKLNLQYGVPKEKH

SEQ ID NO: 2599 - DNA, 750 bp, Corynebacterium glutamicum
  CDS (101)..(727): RXA02146
ggttctctcgcagagagagaaggagtggggataggggccttccgctccgaacccgacagctaactcggtcagcaaacaggaagaatttggagtttcatcagtgggtaagcaccgtcgcaacaattcaaacgcaactcgcaaggctgtagcagcatctgcagttgcgcttggagcaaccgcagctatcgcctccccagcacaggcagctgaggttgttgttcctggcaccggaatcagcgttgacatcgctggcatcgagaccactccaggtcttaacaacgttccaggaatcgatcagtggatcccttcccttagcagccaggcagctcctactgcttacgcagccgtcattgatgcacctgcagcacaggctgcacctgcagcaagcaccggtcaggcaatcgttgatgcagcgcgcaccaagattggttccccatacggttggggtgctaccggtcctaacgctttcgactgctccggccttacctcatgggcatacagccaggttggcaagtccatcccacgtacctcccaggctcaggctgcacagggcacccctgttgcttactctgaccttcaggctggcgacatcgttgcgttctactccggcgctacccacgttggtatctactccggccacggcaccgttatccacgcactgaacagcagcacccctctgtctgagcactccttggattacatgccattccactctgcagttcgtttctaatctgcataaagtcttaagct

SEQ ID NO: 2600 - protein, 209 aa, Corynebacterium glutamicum
VGKHRRNNSNATRKAVAASAVALGATAAIASPAQAAEVVVPGTGISVDIAGIETTPGLNNVPGIDQWIPSLSSQAAPTAYAAVIDAPAAQAAPAASTGQAIVDAARTKIGSPYGWGATGPNAFDCSGLTSWAYSQVGKSIPRTSQAQAAQGTPVAYSDLQAGDIVAFYSGATHVGIYSGHGTVIHALNSSTPLSEHSLDYMPFHSAVRF

SEQ ID NO: 2601 - DNA, 525 bp, Corynebacterium glutamicum
  CDS (101)..(502): RXA02152
aagccgttaaaagttgagactcgcgctgagaatctcacagaaaactccgaagctcccgctaaggtagctaccggaatcaaatcttagggaaggaaaacatatggctatttaccgtaagcttgcggcttccgctgcagcactggccctgtccgcatcactggtcgcttgtggcgactctgaggacaccaccgaagaaacctcaaccacctcttcttcgaccacttccagctcctccagcagctctagctccagcaccgcggctacttccgaggaatcttccgcagttgaagagccagcagtggaagctcctgtggaagaggctccagtcgaggcacctgttgagcaggcacctgtcgtggagcaagctccagttgagcaggctccggcaccggttcaggaagcacctgcaccagtcgagcaggctccagctccagttcaggaagcacctgcagctgacgcgccacctgcacttccaggtggtggcggcggacacgctggctactaaaaattcatgcttttacccac

SEQ ID NO: 2602 - protein, 134 aa, Corynebacterium glutamicum
MAIYRKLAASAAALALSASLVACGDSEDTTEETSTTSSSTTSSSSSSSSSSTAATSEESSAVEEPAVEAPVEEAPVEAPVEQAPVVEQAPVEQAPAPVQEAPAPVEQAPAPVQEAPAADAPPALPGGGGGHAGY

SEQ ID NO: 2603 - DNA, 876 bp, Corynebacterium glutamicum
  CDS (101)..(853): RXA02163
agcccgtacgatttctgcgttcccatcctctgcaccagctgcgcagaagatctccgaagccaacaccacgacgggccgattcaccccattctattcgcctatggcggtggcaacattcggaaccatcaccgacatgttggaaaccaaggggatcgtgagcaatgtaggcggcaccgacaccatcgatttgggcgcgttgttgaatgaaacccaagccggaacccgctggagcgaacttagccccaactatcagtccaaccgcgtcgtgcagatttctaccaccgatgtgcgcacctctaactcggcggccatgtacctatcaatgatgtcctgggtgaaaaatggcggaaaaacggtgagcagcactgcggaagccgatgccatcatcccagagcttagccaactgttcgtgggccagggctataccgaaagcacctccgccggcccgtttgatgaatacctctcccaaggaatgggttctaaaccaatggtgatgatctacgaagcccagttcctcgcggaacaaaacaaggaaaactcacggatttccggcgatatggaactagtgtatccaagccccaccgtgtacagcacgcatacggtggttagcttgagtgacgtcggcgcggagatcggcgaactcctagaaaccgacgaaaccctgcagcagttggcagtcaaacacggttttaggccaaagaactccgcaatgatcgccgatgctggcatgaccgaccgcatgcccaacaacctcaatgtcattgatccgccggactatgacttcctagaacgactcattgatggcgtgggcgcatcgtacagtgccaccccagcagaagaggacacagatctatgaaaaatcttgtaaaaggtaca

SEQ ID NO: 2604 - protein, 251 aa, Corynebacterium glutamicum
MAVATFGTITDMLETKGIVSNVGGTDTIDLGALLNETQAGTRWSELSPNYQSNRVVQISTTDVRTSNSAAMYLSMMSWVKNGGKTVSSTAEADAIIPELSQLFVGQGYTESTSAGPFDEYLSQGMGSKPMVMIYEAQFLAEQNKENSRISGDMELVYPSPTVYSTHTVVSLSDVGAEIGELLETDETLQQLAVKHGFRPKNSAMIADAGMTDRMPNNLNVIDPPDYDFLERLIDGVGASYSATPAEEDTDL

SEQ ID NO: 2605 - DNA, 1698 bp, Corynebacterium glutamicum
  CDS (101)..(1675): RXA02164
tcaatgtcattgatccgccggactatgacttcctagaacgactcattgatggcgtgggcgcatcgtacagtgccaccccagcagaagaggacacagatctatgaaaaatcttgtaaaaggtacagcgctgggcttgagcttggtgcttctggcaggttgttcaactgtttcggattctatcgatagcctcggcgggggcctgggtggttcctctgagactttgaagattgtggccgccacagagctggaagatctgcagcccgcgatcgagcaagcctccgacgacttgggttttgatattgaactgagctttccaggcggcacactcagcaacagccaagccctcatggatggcgcttttgaccaggactatgatgccacctggtttgccaccaaccgttacgtcgatctgatcggcgcttccaacaagctgggggagaccaccaaaatcgcgacctctcccgtggcgttcggtgtgaaaacttccatggcccaggagctcggctgggatcagcgccagccaacctgggaagagctgggccaggcctcgcagacccaagatttcaccttcggtatgaccgatccggccacttccaactccggattttccgcgctcgttgccatggccacggcatatgctgataccggccaggccttaacaaccaacgacatccccgcgatcgccgagccgatgtccacatccctttccggccaaaccatcacctccggttcctctggctggctcaaagacactttcctggaacagcctgaccgcgcgaatgcgatcatcaactacgagtccgtcctgcacaccatgatcagcgaagacggcgccgatatcaccgtcgtggtgcccgccgatggcgtggtcagcgccgattacccgctctctacgatcacgggctccgaccagggcgagcatgtagcagagctggccggctggttcgctgagcaccccgacgctttaacagatacttatcgacgtccgaccaccgcgaacgcaacgctcccagcggagcttagctcgcagaccatcatcgaagctcccttcccagggagcaagacggtcaccgacgcgcttatcgacgcctacaccaatcaattccgcgtcccaggcgaaaccacctttgtgctcgacgtttccggatccatgctgggccagcgcatcaccttgctcaaagacaccatgtcagacctgatcagcggcggcgcgaccactgaccttgccaacgtgtccctgcgcgaccgcgaaaaagtatcgatcattcctttcagcttcgggccacacgaagtaatcagcgaaaccctcggtgcggtgggcagcccaagccgcaccgatctgcagcagcgcgttgaagccttgcaagcagacggcggaaccggaatttacgacgcagtgctcgccgcctacgcagagtccgctggtggcgactacatcccatccatcgtgctcatgaccgacggcgaactcaccgcaggacgaacctacgatcaattcctcaccgaatggaacgcgcttcctagcaatatccgatcaattccagtgtttgtcatcctttacggtgaagccaatgttgcggatatggaacaattggcagcaacaaccggcggtgagacctttgacgccatcaacggtgacctagacgaagcatttaaggagattcgtgcctaccaataatggaggatccttctttttct

SEQ ID NO: 2606 - protein, 525 aa, Corynebacterium glutamicum
MKNLVKGTALGLSLVLLAGCSTVSDSIDSLGGGLGGSSETLKIVAATELEDLQPAIEQASDDLGFDIELSFPGGTLSNSQALMDGAFDQDYDATWFATNRYVDLIGASNKLGETTKIATSPVAFGVKTSMAQELGWDQRQPTWEELGQASQTQDFTFGMTDPATSNSGFSALVAMATAYADTGQALTTNDIPAIAEPMSTSLSGQTITSGSSGWLKDTFLEQPDRANAIINYESVLHTMISEDGADITVVVPADGVVSADYPLSTITGSDQGEHVAELAGWFAEHPDALTDTYRRPTTANATLPAELSSQTIIEAPFPGSKTVTDALIDAYTNQFRVPGETTFVLDVSGSMLGQRITLLKDTMSDLISGGATTDLANVSLRDREKVSIIPFSFGPHEVISETLGAVGSPSRTDLQQRVEALQADGGTGIYDAVLAAYAESAGGDYIPSIVLMTDGELTAGRTYDQFLTEWNALPSNIRSIPVFVILYGEANVADMEQLAATTGGETFDAINGDLDEAFKEIRAYQ

SEQ ID NO: 2607 - DNA, 735 bp, Corynebacterium glutamicum
  CDS (101)..(712): RXA02165
gaagccaatgttgcggatatggaacaattggcagcaacaaccggcggtgagacctttgacgccatcaacggtgacctagacgaagcatttaaggagattcgtgcctaccaataatggaggatccttctttttctcccgcaagaatctcgcgggtatcgctattgcaacgctgattatcgcgctgcacttagtgatcggactcggagcattttggcctgttgtcgccatcgccggatacggcgctgcggtggcacttacacctaaaaaccctccgaagaaggaactccctccggttcaggcaactcccgaattagatagcccgggtctgcttgcagccaggtctcaagaactcgtgagaactatgtatagccacggtgctgcagcaccagtgatcgaagcgattaagaggctagacagctcactgcaattggtcattggtaactggacaagcctgaccaattttcccgagcaccaagtcaccattcgctcaattatcaaccagtacatcccaggcattatcgacgcttacctgaagatccccacccgcaacgatcctcgggcagtcgaagacctcattgaatccttcgacctcctgaactccgagacgatgaagatcttcaatgcgatccaagaacaaggccttaataaccttgaagatcacggtcgcgcactgcgcatgcaatttggtcaactgccagaagaattccgggaatagccactcaatgcagttaagtt

SEQ ID NO: 2608 - protein, 204 aa, Corynebacterium glutamicum
VPTNNGGSFFFSRKNLAGIAIATLIIALHLVIGLGAFWPVVAIAGYGAAVALTPKNPPKKELPPVQATPELDSPGLLAARSQELVRTMYSHGAAAPVIEAIKRLDSSLQLVIGNWTSLTNFPEHQVTIRSIINQYIPGIIDAYLKIPTRNDPRAVEDLIESFDLLNSETMKIFNAIQEQGLNNLEDHGRALRMQFGQLPEEFRE

SEQ ID NO: 2609 - DNA, 300 bp, Corynebacterium glutamicum
  CDS (101)..(277): RXA02166
cggtcgcgcactgcgcatgcaatttggtcaactgccagaagaattccgggaatagccactcaatgcagttaagtttttcctgcccggtaggatggtccgtatgagtcttgatccacagcttcttgaagtcctggcctgcccaaaggacaagggcccacttcgatatctggagagcgaacagctcttggtcaacgaacgcctcaacctggcctatcgcattgacgacggaattccggtgcttctcatcgacgaagccaccgagtggacccccaacaactagaagtacatcaaggacatttt

SEQ ID NO: 2610 - protein, 59 aa, Corynebacterium glutamicum
MSLDPQLLEVLACPKDKGPLRYLESEQLLVNERLNLAYRIDDGIPVLLIDEATEWTPNN

SEQ ID NO: 2611 - DNA, 2937 bp, Corynebacterium glutamicum
  CDS (101)..(2914): RXA02168
agggtttagtcatctatttcggctacgctcacgtaacctacgcattcgtaagtggtcatgggtccaagaagcccattccaagacttaggagctttatttcgtgagtatttcttcactgacaccgctgcactctttcaaagagccagcaattctgtacgccggtcaggcttctgcctggcagcaggtgatcgctgattccagcgaagaccacatcaccgcaacgcacctgcgcgagctcctgtctcgctcccgtgcaaagactgcacctttcgctcgccaaatcaccgccatcgtgcctggctcacttgctcgtcttgaggaactgacccgcgaagacgcacaaatcggtgcagacatcgacgcacagcctgccgtttccattccaggcattctgctgggacagatcgctgcaacccgtcagctgcgtgacctcggactcgatgtcgcagcagcttcccgccttggacactcccagggcattttgggcgttgaagcagtagacaatgaagaagacgttttagctttcgccatcctgctgggcgcagcagcttcccagttcgctggcaagggcgcacatatgctctctgttcgcggcctgtcccgtgagatcatccaggacaccatcgctggtgtcgatggggtagaggtctccctgcgcaacgctcgtgcacactttgttgtctctggtaagccagaggcactgaagaaggctgctgctgctctacagcgcgcagctgatgtttacaacgaagacatcaacgaaaagcgcaagggtggatccctggcagagcctaagtttgactacttggatgtggccattcctttccaccactcctccatgcaggacgcagccgacttggctgtcgagtgggcaaccacctgtggcctaaacgtcaacgcgcgcgcgttggcagaagcaattctagttaacccagctgactgggttgagcagatcgcaaacctcaaggctgattacgttctttccctcgatgcaggcgtcagccgtttcaccgctccattgctagacggtcgcggaatctctttggttcctgcgttctccgctgcagagcgcgacaacttggctcgccctggcttccacgttcctaccgctgaggattggtccgagttcgctccaaagctggttaagcttccaaacggtgagcacaaggttctcaccgggttctcccgcctgactggttattccccaatcgtcctggctggcatgaccccaaccaccgttgatcctgagatcgttgcagctgcagcgaacgctggacactgggccgaaatggccggtggcggacagtactctgaagaagtcttcaccaagaacaaggaaaagctcgtttccctgctcaaggttggacgctccgcacagttcaactccatgttcttcgaccgctacatgtggaacctgcagttcggtgcacagcgcatcgtttccaaggcacgtgcaaccggtacctccatcaacggtgttgttgtctccgctggtatcccagaggttgaggaagcaactgagctgatcaacgatctgaacgctgatggcttcccatacgttgcattcaagccaggcaccgtggatcagatccgcgcaaccctgaagattgctgatgcaaacccagagaccaagatcatcatccagatcgaggacggacacgctggtggccaccactcctgggtcaacttggacgatctgctcctgaccacctacgcagagctgcgttcccgcaagaacgttgtcgtcatgatcggtggcggcatcggaacccctgcaaaggctgcttactacctgaccggtgaatggtccaccgatttgggcttcccagcaatgccagtggacggcatcctcgtgggtaccgctgccatggcaaccaaggaagcaaccacttctcctcaggtcaagcaggcactggtcgacaccccaggtgttgatccacacgacgctggcggctgggttggccgtggcgatgctcgtggtggcgtgacctctggtctgtcacacctgcacgctgacatgtacgagctggacaacgattctgctgcagcttcccgcctgatctcttccatcgattctgatgattacgcagatcaccgcgaagagctcatcgaggctatcaacaagaccgctaagcctttcttcggcgaggtcgaagagatgacttacgcagagtggatccagcgttgggttgagcttgcttacccaactcaggacccaacctgggatgatcgtttcctcgatttggttcaccgcattgaagctcgtctcaacgaggcagagcacggcgccatcaccacactgttcccagaccatgcgtctgtggaaaatgaggaagaggccgtcgaaaagcttcttgctgcttacccgcaggcccgcgagatccaggtctctgcgcgcgacgccgcgtggtttattggtctgtgccgcaagcaccacaagcctatgccttgggttccagcaatcgatgctgacctagcacgctggtggggccttgacaccctgtggcagtcccagaacgagcgctacggcgcgaactcagtccgcgttatcccaggaccagtctccgtcgccggcatcgaccgtgttgacgagccagttgcagagctgctcggccgcttcgaagctgcctgcgttgacgctctcgacggcgagccagaagagatcttcgctcgcctcaatgagtccaagaacgagcgcgaattcctgctggctaccccacacatcgtgtggcacggcaacctgatcgacaacccagctcacgtcctcaacgagggtgctttcgagctcatcgaggaggatggctactgggtcatccgtatcctggctgattcctacttcgacgatctgccagttgagcagcgcccatacctggttcagcatgttgacatcccagttgagctgggtgacgctggttgaaccggtggtttcccaattgg

SEQ ID NO: 2612 - protein, 938 aa, Corynebacterium glutamicum
VSISSLTPLHSFKEPAILYAGQASAWQQVIADSSEDHITATHLRELLSRSRAKTAPFARQITAIVPGSLARLEELTREDAQIGADIDAQPAVSIPGILLGQIAATRQLRDLGLDVAAASRLGHSQGILGVEAVDNEEDVLAFAILLGAAASQFAGKGAHMLSVRGLSREIIQDTIAGVDGVEVSLRNARAHFVVSGKPEALKKAAAALQRAADVYNEDINEKRKGGSLAEPKFDYLDVAIPFHHSSMQDAADLAVEWATTCGLNVNARALAEAILVNPADWVEQIANLKADYVLSLDAGVSRFTAPLLDGRGISLVPAFSAAERDNLARPGFHVPTAEDWSEFAPKLVKLPNGEHKVLTGFSRLTGYSPIVLAGMTPTTVDPEIVAAAANAGHWAEMAGGGQYSEEVFTKNKEKLVSLLKVGRSAQFNSMFFDRYMWNLQFGAQRIVSKARATGTSINGVVVSAGIPEVEEATELINDLNADGFPYVAFKPGTVDQIRATLKIADANPETKIIIQIEDGHAGGHHSWVNLDDLLLTTYAELRSRKNVVVMIGGGIGTPAKAAYYLTGEWSTDLGFPAMPVDGILVGTAAMATKEATTSPQVKQALVDTPGVDPHDAGGWVGRGDARGGVTSGLSHLHADMYELDNDSAAASRLISSIDSDDYADHREELIEAINKTAKPFFGEVEEMTYAEWIQRWVELAYPTQDPTWDDRFLDLVHRIEARLNEAEHGAITTLFPDHASVENEEEAVEKLLAAYPQAREIQVSARDAAWFIGLCRKHHKPMPWVPAIDADLARWWGLDTLWQSQNERYGANSVRVIPGPVSVAGIDRVDEPVAELLGRFEAACVDALDGEPEEIFARLNESKNEREFLLATPHIVWHGNLIDNPAHVLNEGAFELIEEDGYWVIRILADSYFDDLPVEQRPYLVQHVDIPVELGDAG

SEQ ID NO: 2613 - DNA, 897 bp, Corynebacterium glutamicum
  CDS (101)..(874): RXA02170
atttaaaccgcccactctccagtcggaggatgggcggttttcgcatgcagtactattagtggacgtgtcaagaacttctaaggttcacccgggatggcgggtgtctactgtccttttagcaggagtagttattattggcggaatttttactctccctcagaaggaggaagtaaaggtttccgaattgcagccacaggccagcgctgcatccatcccgtcttcatcttccacagctgggaaagcagtggaagaaagccctctaacgcagtttgtggaaaactcgacaggctcccaaattacgtacatgagcctgaaagacgatttccatactggcacgtctacggaacgttttgcgcgcccagcgttaagtttgtctaagctctacatcgctgaatatgtgctcgagcacggcacgaataatgagaagtctttggcgatggaaatgatcaaagattcctccgacgtatccgccgaaatcttgtatgaggcgtacccagaatcaattgaggagattgcggatcaatacggattgctctccacaaggggagacgcgcactggggatactcggtgacatccacttacgatttggtgaaatttgtcagcgctctcattatcgatgatccagattcaccgatccttgaagcgatgcgtaatgccagcgcagtcgcggctgacggttatccgcaagactgggggacagcggtgcttgatgaggcagaaggatccaaatggggatggtctgatgatctcatgctgcactcctctgtgacctttggcgaagactatgttgtggcagctgctgtgactggatcaaaagaagacctcacccaattggtggaaaaccaattgggtgaggttgtgagtcagcacggctagtttagctagatagggtgcca

SEQ ID NO: 2614 - protein, 258 aa, Corynebacterium glutamicum
VSTVLLAGVVIIGGIFTLPQKEEVKVSELQPQASAASIPSSSSTAGKAVEESPLTQFVENSTGSQITYMSLKDDFHTGTSTERFARPALSLSKLYIAEYVLEHGTNNEKSLAMEMIKDSSDVSAEILYEAYPESIEEIADQYGLLSTRGDAHWGYSVTSTYDLVKFVSALIIDDPDSPILEAMRNASAVAADGYPQDWGTAVLDEAEGSKWGWSDDLMLHSSVTFGEDYVVAAAVTGSKEDLTQLVENQLGEVVSQHG

SEQ ID NO: 2615 - DNA, 462 bp, Corynebacterium glutamicum
  CDS (101)..(439): RXA02172
gagaaacatataagttgctttattttaaagccggcattgcttagagagtggccgatcaccgactcccgctcgagggatatgaaagcgagataagtttccagtgaatgcagaacaaatcacccaggggcgtcgccagccgacggctcaagagtttcgggacatgcaggcgagcccagaatttggagagctccgcagcaagttccgttcctttgctttcccaatgaccgttgccttcttcttgtggtacgtcgtctacgttctggttgcatcctttgcatcagagtggatggcaaccccagttttcggcgcaatcaacattggcctaatcttcggcttccttcagttcgtaaccacattcgtcattacttacatctatgtcatgtttgcgaacaagaacttggagcctcgtcaggctgctattcgccagaagatggaaggttaatcagatatgaattccactat

SEQ ID NO: 2616 - protein, 113 aa, Corynebacterium glutamicum
VNAEQITQGRRQPTAQEFRDMQASPEFGELRSKFRSFAFPMTVAFFLWYVVYVLVASFASEWMATPVFGAINIGLIFGFLQFVTTFVITYIYVMFANKNLEPRQAAIRQKMEG

SEQ ID NO: 2617 - DNA, 1056 bp, Corynebacterium glutamicum
  CDS (101)..(1033): RXA02177
aatacccccactttgaaaaacaccccgtacagttacaccagtacggggtgttttttagttaagcttgggtgatcacttaacccagctagaaggagtcaacatgcgggaaatattcctgatcagcggtgattccaccgaatcatccttggttttcaagacctccgaagaggacggcgctgaggaatttttcattgctgtaacagatgaactccacgccattcttgcaggtcatagcgagattaagagcgccccagaacccgaagaacacaaagaggtcccacctcctgttctagagccggtcgctgcggtagaagagccccgtgaggaaaaagaaattgaccctcgtatcagcgctcccctgacgatgtcaccccgcgaaattcagattcgggttcgctcaggcgccaccatcgaagaattagccgaagaaatcggcgtcaccgaagcccgcgttgagccctatgcccaccccgttttgctggaacgtgcccgcattgccgacttggctaagcaatcacaccccatcagggaaaatggtcctgcaaaactgactctctgggaaattcttgcaacggcgtttgccactcgcggccacgatctcaccacagcacgctgggacgcctacaaagacgccaccaaccagtggatcgtgcgagttgattggaaagcaggactcagcgacaactacgcggagtggacgttaaacctgcacaacaccagcaatcccaccgctgatccgcggaccccagtcgcagccgatttgatcgatcctgaattcattcagccggtacgtaccttgacgtccgtaaactccacccaggaacagtacgacgacgaaaccgatgttttcgacaccgtaccaagccctgacgacgcaccagactcagaatccgatgccgttgctgaaatcaccaacgacaacgaacctgaagtcgatgcggaaggcccacgcaacaggcgtcgaaaagcagtaaccccacactgggaagatgttcttttaggagttcgcgcaaacacaaagcgcccgaagaaataggatgtgctgatgccaagtca

SEQ ID NO: 2618 - protein, 311 aa, Corynebacterium glutamicum
MREIFLISGDSTESSLVFKTSEEDGAEEFFIAVTDELHAILAGHSEIKSAPEPEEHKEVPPPVLEPVAAVEEPREEKEIDPRISAPLTMSPREIQIRVRSGATIEELAEEIGVTEARVEPYAHPVLLERARIADLAKQSHPIRENGPAKLTLWEILATAFATRGHDLTTARWDAYKDATNQWIVRVDWKAGLSDNYAEWTLNLHNTSNPTADPRTPVAADLIDPEFIQPVRTLTSVNSTQEQYDDETDVFDTVPSPDDAPDSESDAVAEITNDNEPEVDAEGPRNRRRKAVTPHWEDVLLGVRANTKRPKK

SEQ ID NO: 2619 - DNA, 993 bp, Corynebacterium glutamicum
  CDS (101)..(970): RXA02178
cccacgcaacaggcgtcgaaaagcagtaaccccacactgggaagatgttcttttaggagttcgcgcaaacacaaagcgcccgaagaaataggatgtgctgatgccaagtcaattgggagaaaacgcggcgatcgtcaccctctggtttgttagcgcatccgatccccaatccatcatccgctcggaacctcgggcggatcgtggatatggccgaaaactgttggcacagctcaacccaacgtggccaattacccccatcgggcagttcgccctcaacagatccgttcctgctagtgccaacgagttctacatcgctggttttcccggcatcaccatcattcaaaccgtgttggaagatgtcacctctttatccaagctgaatcctcggttactgcgcagcgtcccggcaacagatgtctacattttcgccgtcaatgaagaaaccacccttggtggcttcgcacacatctacaacggtgagatcaaacgatccttcatcgcctatgaagagcgcgtcttcgaagacaacggcatccccggcggctttgaaaccccctactgggcaggcaaaaaaggcacccggaaaactgcgctgtcgttgcccttcaaccccatcgaactagtccacgaagcacaacgtgcatggctcggattcgacgccaccacctcccctgacatcaacgtcgttgcctatgccaccgatggtcgccccgagccgcgcatcgctgcaccccgcataattaacagcgaggaagtgacaaggtccgccgtcgaaaagctaggactgcgcgaatccgccttctacgacgactacgaagaatacgaggcacccgatcgagtggtgtccaagcgcattacctcaaacgcgaaaaaagcggccagctcagcacagaaatttggtaaatctctgtggcgagccagccgcgaattcgggtcaaacatggcggaaagactccgccacactgaccgctagcgctactacttagcgctgtt

SEQ ID NO: 2620 - protein, 290 aa, Corynebacterium glutamicum
MPSQLGENAAIVTLWFVSASDPQSIIRSEPRADRGYGRKLLAQLNPTWPITPIGQFALNRSVPASANEFYIAGFPGITIIQTVLEDVTSLSKLNPRLLRSVPATDVYIFAVNEETTLGGFAHIYNGEIKRSFIAYEERVFEDNGIPGGFETPYWAGKKGTRKTALSLPFNPIELVHEAQRAWLGFDATTSPDINVVAYATDGRPEPRIAAPRIINSEEVTRSAVEKLGLRESAFYDDYEEYEAPDRVVSKRITSNAKKAASSAQKFGKSLWRASREFGSNMAERLRHTDR

SEQ ID NO: 2621 - DNA, 801 bp, Corynebacterium glutamicum
  CDS (101)..(778): RXA02181
tttggctagtagggtgataatctcaaataaaatgcactttcaccagctttttcgattccggaaggtctaactacacgtcgtggtgaccacaagttttctcatggttgacggacacatccgcaatcttcagggccacatcgatcgcctcgaggcggcagcccctactgcttcacagttccatgatcgcatcatcactcaattgcgtgaagctccgggcagtgttcaggcagctgtcacgattgaaaataaccactataacgtcgagctgcgcccgccccgcaagttaaattcactggtcacccttgatacccacggccaccgcgatgagcgcctacatccaaagattaaaggccacgatatcgcgtggcagaacacggccaccgcaaacagccgccgccagggcgccgatgatggattgcttgtcgacgagtccggccaggtgatcatggctatcaatgcctctctcttggcgattaagggcgacaccgtgtttcattccacgcaccccaggtcgctgccgtctgttctggaatcaacggtcattgcctacctgcaggaacaaggctgtaatgcaaagcctcgagagcaaggcttcaacatcaatgatttgcgctcttcggaagtgtggctggtggattctttgtccggcatccgtcgcgtcgctgcatggctcgaatacggttccaaattcccagtctcagaaacgcgacctgtggcagctttcgtgccgacgttttctgaagtcaatgactacctatggagcactgcacagcaagtgtaggtcgctcgactgttattctc

SEQ ID NO: 2622 - protein, 226 aa, Corynebacterium glutamicum
MVDGHIRNLQGHIDRLEAAAPTASQFHDRIITQLREAPGSVQAAVTIENNHYNVELRPPRKLNSLVTLDTHGHRDERLHPKIKGHDIAWQNTATANSRRQGADDGLLVDESGQVIMAINASLLAIKGDTVFHSTHPRSLPSVLESTVIAYLQEQGCNAKPREQGFNINDLRSSEVWLVDSLSGIRRVAAWLEYGSKFPVSETRPVAAFVPTFSEVNDYLWSTAQQV

SEQ ID NO: 2623 - DNA, 648 bp, Corynebacterium glutamicum
  CDS (101)..(625): RXA02183
ttgcacatattccggattccgatcgtttttatatcactggtaagcgttggcctgacctctatgaggttagattcgtccctgctgactagaatcaagactcatggcaagccggaagaccaagcgtaaaaacctcattcagattctcagccttatcgttgctgtgttattggtggtgattttgtctgtggtgttccagcaatggtggaacaatcgcccagagccactcccccaagagatctctatctcagcatcttctcccgctggtgaaatcgaggtattcccattcagcatgtgtgaaccaggtgttgaatgcgaagagaacgaggtgccaacgctggaagttggtgctgatgaagagttgcacctgacgattccagaggcaattcatgatcatgactggtacttgttgaccatttatgatgatccggctgcaaatgacgagttctaccacaccagttacgacgccaccgaggcaaccgttcctggttctgtggatccaaccgaagagggtgcggagcgcccacgtctggtcgtagtggaagtgtccgctgtgatgatcggtgaggatgaaaatggtgaggaaagcccttacaccgtcacgtggtcgctatccacgatgaacgagtaactcactcacaaacaataagg

SEQ ID NO: 2624 - protein, 175 aa, Corynebacterium glutamicum
MASRKTKRKNLIQILSLIVAVLLVVILSVVFQQWWNNRPEPLPQEISISASSPAGEIEVFPFSMCEPGVECEENEVPTLEVGADEELHLTIPEAIHDHDWYLLTIYDDPAANDEFYHTSYDATEATVPGSVDPTEEGAERPRLVVVEVSAVMIGEDENGEESPYTVTWSLSTMNE

SEQ ID NO: 2625 - DNA, 2322 bp, Corynebacterium glutamicum
  CDS (101)..(2299): RXA02187
ggatcgacgaagtgcttcttctctacgtttgccatgtcatacattctttcaaactctgggaacaaaagtcacctcaacaaggcttaaacttaacaacatcatgaaaaaagactcccccatccccaccctcaaggggtggttggatactcaaagtgatgatcagctctccacaatccttagaaatcgacccgatacggttctccctttaccacctaatttggcctctcttgctgcgcgtttacagctgagggcgtctgcgattcgcgcggtgttgaaactcaatgcgttggaacttggtgtgttggaggccgtggccaaccttggtggtgaactccacccggttactgcccccgaagtggtggaatatttgcatgtggcgttggcagaggatcttccagcgcaagacacgattggtgcggctcttgccacgctgaaaaatttcgcgttggtttatggcgatgaccagttgatgattgctcaggagacgatggctgcgttgcctgttcattggcggttgcttccggaggtaagtgatcgcgggcagagtgaggaacaggtgagggaaagcgtcgataagctttctgataggcaccgcaaacttttgcacacgcttgcggcctcgggtggcttcggtctgacgcgcgatgcggcgcctgatgcggatccgtcgcggccgattccgcagttgctggcgtcggggttgttggcgcgcgtggatgagcagaccgtgcgcctgccggcgatggtgcggcgtgtgattgagggccgcgagcagctgcccgctcaggtgcgcccaattccgcgcacggcggcgccaggttcgaatgatggcggcattgcagccggccttgaggtggtgcggcacatgcgattgcttatcgacgccctcagccacgttcccgcccccacgctgaaagtcggagccctcggtgtgcgcgtggtgactcgcctgagcaaggaattagaccttgatgagaccgagctggcacgtctactgagtttgggtatggccagcggtctaatccgtaaaggcgtgcccgatccattgcccatggatgatgatggcggcgattacgtcgctcccaccccgctggctgacgaatggatggaatatgatctggcgcaccaattgggcacgttgatgtctggttggtggaagcaaacttacgcgccgtggttggtgggtcgggctgatgataaggacaagccgatccatgttctcagtaaaacaagcatcattgattcgcttcctgatgctcgtgcgaagatcctgtcctctttatctagggttttagtggacaatctgcacgcggatttagcattccattatccccttgcggcgagtcggatgaatcctgacaccatcacacagctggtacaggaagcccagtggatcggagcatattctcaaggcgtgaccgcagcgggtcaggccttaattgatggcgaaaaccctacggaggtaatcaaggctcctgcgccggtggagaatttcatcgtgcaaggcgatttcaccatcatggttccaggaccactaacccctgcgatgcaaaaaaccatggattcgatcgcatcgttggaatcacctggtttggcctcggtgtatcgactcagcgagaaatccatcaggcatgctctggatcttgggctcaccaccccggaaatcttggagtttctcaaagaacattccatgacagatctgccccaatctgtgggctatttgctcagcgatatcgccagaaagcacggcaccctccgaggcggccctgcactgtcctatatccgtagcgacgatcccgctttgctgcattccgcagtggaggcgggcgccgatgtggcgcttcggcagatcgctcccaccgttgcgattgctcaagcacccctgcttcaggtgatcactgtgctgcgtgctgccgggttccaacctgtggcagaagacggcgaaggcgcaagtctgaatatctcgccatcccctgcacgtgtgcccgcagcttccccaccaccagttgttccggcactggatgaaagccgggtacaggcagcagtcaaagcaatccgacgggaaaattcagcatctcaaggaactgtttccacacagccaactctttcggtgctgcaggctgcagtgcgagggcagcgcacggtgacgttggggttcgtcgataagcaaggcgtggccgtgcaccgcgtcgtcaagcctttaaccgtcaacgccgggcaggtggacgctgtggatgaagccacaggtgcggtgcatcgtttcatgttgcacaggatcacagaagtaatagtggataactagcctagaagtgacataatgga

SEQ ID NO: 2626 - protein, 733 aa, Corynebacterium glutamicum
MKKDSPIPTLKGWLDTQSDDQLSTILRNRPDTVLPLPPNLASLAARLQLRASAIRAVLKLNALELGVLEAVANLGGELHPVTAPEVVEYLHVALAEDLPAQDTIGAALATLKNFALVYGDDQLMIAQETMAALPVHWRLLPEVSDRGQSEEQVRESVDKLSDRHRKLLHTLAASGGFGLTRDAAPDADPSRPIPQLLASGLLARVDEQTVRLPAMVRRVIEGREQLPAQVRPIPRTAAPGSNDGGIAAGLEVVRHMRLLIDALSHVPAPTLKVGALGVRVVTRLSKELDLDETELARLLSLGMASGLIRKGVPDPLPMDDDGGDYVAPTPLADEWMEYDLAHQLGTLMSGWWKQTYAPWLVGRADDKDKPIHVLSKTSIIDSLPDARAKILSSLSRVLVDNLHADLAFHYPLAASRMNPDTITQLVQEAQWIGAYSQGVTAAGQALIDGENPTEVIKAPAPVENFIVQGDFTIMVPGPLTPAMQKTMDSIASLESPGLASVYRLSEKSIRHALDLGLTTPEILEFLKEHSMTDLPQSVGYLLSDIARKHGTLRGGPALSYIRSDDPALLHSAVEAGADVALRQIAPTVAIAQAPLLQVITVLRAAGFQPVAEDGEGASLNISPSPARVPAASPPPVVPALDESRVQAAVKAIRRENSASQGTVSTQPTLSVLQAAVRGQRTVTLGFVDKQGVAVHRVVKPLTVNAGQVDAVDEATGAVHRFMLHRITEVIVDN

SEQ ID NO: 2627 - DNA, 693 bp, Corynebacterium glutamicum
  CDS (101)..(670): RXA02199
acagcttagtacggattagacaattcccgaacttttcattcgtagttcattttcaacgccgcctaagcaacacaggcaaagcgccactagtctcggtcgcatgactgactccactccgcaaggctcaacaccaggcatgtcccctgaagctatcctcaacggcaccggaaagccgtgggaagagtggctaaaattgcttgacgacgtaaaagccacctcttggactcacacccacatcgcaaagcacatcgtggacaactttgatgtcagtggctggtgggctcaaggcatcgcgattggttatgaatacgaacgtggcatgcgcaaacccgggatgaccagcgatgggttcgcggccaatgcctccaaaacccttaacctgccggtcgaaaaagtgtggaagctcttcggagacgatgacctgcgggcgcagtggctcgatcccgcactaattgagaaaacctccgcctccgaacctagaacattcaatgccaaatggttggccgatgattctcgagtgagcgtcaacttcacctccaaaggcgacaataaatccagcttcggcatccagcacagacgcctgcctgatcaagacagcatccctgtcatgaaagcattctggaaagaacgcatcgctgcattagttgaggtgtcaaaacaattttcgctttaacattaagttcttagccttca

SEQ ID NO: 2628 - protein, 190 aa, Corynebacterium glutamicum
MTDSTPQGSTPGMSPEAILNGTGKPWEEWLKLLDDVKATSWTHTHIAKHIVDNFDVSGWWAQGIAIGYEYERGMRKPGMTSDGFAANASKTLNLPVEKVWKLFGDDDLRAQWLDPALIEKTSASEPRTFNAKWLADDSRVSVNFTSKGDNKSSFGIQHRRLPDQDSIPVMKAFWKERIAALVEVSKQFSL

SEQ ID NO: 2629 - DNA, 501 bp, Corynebacterium glutamicum
  CDS (101)..(478): RXA02203
cgattcaaaagagttcaccgaggtaggaaacatcgtggtcgcagccattgatgccctcctgggcgtgcagctctaggaaatttcaggaacaatacatctcatgaccattcgcgccactttccagccttccgtagatgaattcatctccactctcgaagagtttgcaacaggttcataccttaaagaggacgaaaaggaattctgggacgaacctttcgatgtcaaggcacttccagatcttcgtttcatcttggaaaactaccttgattccctagataagctcggtgaagcaccagaccttgatgctgttaacgcctccgctcagtccacccttgatgagctggagaagttcaacacaaagcaccacggtgctgttgttgagcctgaagaaaaagaagagatcactaaattgatgtttgatgctgcaaagcagactggtgcagatgatctttctgcagaggctttccctgagtttgagtaaatttcagtagaagtttttta

SEQ ID NO: 2630 - protein, 126 aa, Corynebacterium glutamicum
MTIRATFQPSVDEFISTLEEFATGSYLKEDEKEFWDEPFDVKALPDLRFILENYLDSLDKLGEAPDLDAVNASAQSTLDELEKFNTKHHGAVVEPEEKEEITKLMFDAAKQTGADDLSAEAFPEFE

SEQ ID NO: 2631 - DNA, 1059 bp, Corynebacterium glutamicum
  CDS (101)..(1036): RXA02206
ggcaggatctgctgctgcggctaggagggttatctcttcattcacccgatctaccgtactaccttatgacctcagtagtgtggtgggcgtgaaacagcgaatggtcggttcaagtggtttgcgggtatccaggctcggtttgggcacctcaacatggggctcgggcaccgagctggctgaggcaggcgatatctttaaggcgttcatcaattctggtggcacgcttatcgacgtctcccccaactacaccaccggcgtcgcggaagaaatgctcggcacgatgttggatgcggaagtctctcgttcggctgtcgtcatttcctccagcgcaggtgtcaaccccgctctgccgctcggccgacgtgtggattgctcccgccgcaatttgattgcccaattagatgtcaccctgcgggcattaaacactgactatttggatttgtggtctgtgggctattgggatgagggcaccccaccgcatgaggtggccgatactttggattacgccgtgcgcaccggccgagtccgatatgccggtgtccgaggatattccggttggcagttagcggtcacccacgctgcatccaatcatgcagcggcctccgcccgccccgtggtcgttgcacaaaatgaatacagcctgctggaacgccgcgcagaacaagaactcctccctgccacccaacacctaggtgtcggattctttgctggcgctccgctggggcaaggcgtgctgactgctaaataccgctccgaaattccccatgattccagagctgcatccacaggacgcgacgcagaagtccaaagctacctagataatcgaggccgcatcattgtcgatgctcttgatactgcagccaaaggattaggcattagccccgctgtcacagccaccacctgggtgcgtgatcgtcccggagtgacagctgtcatcgtgggcgctcgcacacatgaacagctgtcacatcttctcaaggcggaatcggtgactttgccaacaccaatcacacaagcccttgatgatgtctccctgtgacttggtccaattacattcac

SEQ ID NO: 2632 - protein, 312 aa, Corynebacterium glutamicum
MVGSSGLRVSRLGLGTSTWGSGTELAEAGDIFKAFINSGGTLIDVSPNYTTGVAEEMLGTMLDAEVSRSAVVISSSAGVNPALPLGRRVDCSRRNLIAQLDVTLRALNTDYLDLWSVGYWDEGTPPHEVADTLDYAVRTGRVRYAGVRGYSGWQLAVTHAASNHAAASARPVVVAQNEYSLLERRAEQELLPATQHLGVGFFAGAPLGQGVLTAKYRSEIPHDSRAASTGRDAEVQSYLDNRGRIIVDALDTAAKGLGISPAVTATTWVRDRPGVTAVIVGARTHEQLSHLLKAESVTLPTPITQALDDVSL

SEQ ID NO: 2633 - DNA, 553 bp, Corynebacterium glutamicum
  CDS (101)..(553): RXA02211
actgtccgaagtattggatctggtcgagggaactgtccgtaaacgcgactaaacgacccctgattcacactttcagactacaagaactagactaagcggtatggtttcagttcttttaattcagccccgtcagggagaagcagtcgccgcagctgagcgacgtgactttttgcaggccaccggtcttaagcctcaagaactgacctcccgaatgttggataccaccacttctcgaattggcagtctggaaggtttcgacggcgtgattgtgggcggaagcccactgaatgccaccaactttgagtacagcgattggcaacgccacgtccaccgcgaattgtccttgctgatcaatcacccactgccaacaatctttgtctgctacggcaatacctttttgaccttcttctctggcggacagattggtcgcacacaccccgaagattccggcgccaccacagtgttgctaactgacgccggcaaacgagacgtactcactcaagacctaccggatagctttacgtcctttactggtcacacggaaaactccgta

SEQ ID NO: 2634 - protein, 151 aa, Corynebacterium glutamicum
MVSVLLIQPRQGEAVAAAERRDFLQATGLKPQELTSRMLDTTTSRIGSLEGFDGVIVGGSPLNATNFEYSDWQRHVHRELSLLINHPLPTIFVCYGNTFLTFFSGGQIGRTHPEDSGATTVLLTDAGKRDVLTQDLPDSFTSFTGHTENSV

SEQ ID NO: 2635 - DNA, 621 bp, Corynebacterium glutamicum
  CDS (101)..(598): RXA02212
gtgatgtgactttctatcacccccttactcacccccattgcttattgagtaaagtcggttcccgctctttcgtgagcccgacactaatgaaggtttttagatgattccagaaaatattgatctcaagcagctcgcttcggagcttggtgatgatgccgtggcaatgggggagcacacaggcaaccagtttccgactttggaaaaagaccttattaatgttgtgacagatgcaaaggaatcagattttggatctttaggggtcgtgattcttgatgaaactccagtgatgacttccaacctgagggatattgcgcaggagctgttgattcaaacggatctggacaccgttgtggtgcgggctccaatgtcggctgcggtggtgagtgatgttcattcgagggcggcgcttgagtcagggcagcatgatttgcttgggaccactgattacgtgctgggaacggagcttttggtacaggatgtaacggaatcgacggtggggaatattgattggggtcaattgctgatttgggggttggttgctttggcaatcgccgtggttgttgcgggtgcgtctgtgcgtcgaaaagcaatatctttataagtaaagttctaaagctttac

SEQ ID NO: 2636 - protein, 166 aa, Corynebacterium glutamicum
MIPENIDLKQLASELGDDAVAMGEHTGNQFPTLEKDLINVVTDAKESDFGSLGVVILDETPVMTSNLRDIAQELLIQTDLDTVVVRAPMSAAVVSDVHSRAALESGQHDLLGTTDYVLGTELLVQDVTESTVGNIDWGQLLIWGLVALAIAVVVAGASVRRKAISL

SEQ ID NO: 2637 - DNA, 329 bp, Corynebacterium glutamicum
  CDS (1)..(306): RXA02216
gtagcgcccgcccctggacacgtggtgttggcaacgggaccaacctgccccatccagatgctgcgcgccaacaagaacacctggtcagttcaattccatgcggatatggatgccgtaggcatgaaaaaccgcatggatttttactccaactaccggttcttctccccagaagattatgaccgcatcattgcagagctaccctctgttgactccatttatgccaacagggtgctccgcaacttcgtggaggtctgcgaaggaattcgtgttgctgatggtgctgagcaccaactcccaaagcttaactaatcgaggagactggtgattcg

SEQ ID NO: 2638 - protein, 102 aa, Corynebacterium glutamicum
VAPAPGHVVLATGPTCPIQMLRANKNTWSVQFHADMDAVGMKNRMDFYSNYRFFSPEDYDRIIAELPSVDSIYANRVLRNFVEVCEGIRVADGAEHQLPKLN

SEQ ID NO: 2639 - DNA, 786 bp, Corynebacterium glutamicum
  CDS (101)..(763): RXA02217
ccaaatgggtatgggcgcttttgaccatcgtcaatggtgttggccccgctgcctactgggctttcggcaggaaaaactaagagttgttagggtggcgctcatgactaataaaacacgagctctactcattggtggccacggcaaggtggccctcctagcaacccccatgcttatcgacgcctcggtgcaggtcacttccatgtaccgcaatccggaccacaggtccgaaattgaggcgctgggcgccacaactttagagcgtgacgtcaccacactcagcgtggaggattgggcagatctgctcaaggacttcgacgtagtggtgtggagcgccggaaacggtggcaagaacggcgcggatgcaacttatgccattgatcgtgatgccgcgatcgcatccattgatggtgcagctagcctaggggagaaggcacctcgctacatcatggtgagctacattggatcctccacgcacaccattgatccttcagcatccttctacccatatgcagaatccaaaaaggccgctgatgagcacctaagctccaccaacctggattaccttatcctcgcaccagcagccttaactctggatgaagtcaatggcgttgaggtgatcgccgataccaacgaagcagccgcaggccgcaccacatcaagagtcctcgttgcggaagttatcaccgagttggtggttcgcgacttcccacaaacccgtgtgctgcctttcgtggatggcgaatcaccagtctcctcgattagttaagctttgggagttggtgctca

SEQ ID NO: 2640 - protein, 221 aa, Corynebacterium glutamicum
MTNKTRALLIGGHGKVALLATPMLIDASVQVTSMYRNPDHRSEIEALGATTLERDVTTLSVEDWADLLKDFDVVVWSAGNGGKNGADATYAIDRDAAIASIDGAASLGEKAPRYIMVSYIGSSTHTIDPSASFYPYAESKKAADEHLSSTNLDYLILAPAALTLDEVNGVEVIADTNEAAAGRTTSRVLVAEVITELVVRDFPQTRVLPFVDGESPVSSIS

SEQ ID NO: 2641 - DNA, 390 bp, Corynebacterium glutamicum
  CDS (101)..(367): RXA02218
caatgatttatatgtcttggacgagcgattaaatagagttggcataccccaaatgatagacccaaagtgtcgtgtccaccgctcgttgtagcatgaacccatgtttgcaatcatgactgtcacagggcaggaccacaccggaattatcgccgcagtttccaccgcgttggctgagctagatgtcaatattcacaacgtttcccaaaccatcatggatcaatggttcaccatgatcttgcacgttggtttcgatgaatcggtcttggatatcgccacagttcaggaacgcatgaagccagtggaaaaggaacagggcttggttattcgtatccagtctgaagccttgttcaacgcggttaatgagatctagggggtgcacatggatgattt

SEQ ID NO: 2642 - protein, 89 aa, Corynebacterium glutamicum
MFAIMTVTGQDHTGIIAAVSTALAELDVNIHNVSQTIMDQWFTMILHVGFDESVLDIATVQERMKPVEKEQGLVIRIQSEALFNAVNEI

SEQ ID NO: 2643 - DNA, 1509 bp, Corynebacterium glutamicum
  CDS (101)..(1486): RXA02219
tcaggaacgcatgaagccagtggaaaaggaacagggcttggttattcgtatccagtctgaagccttgttcaacgcggttaatgagatctagggggtgcacatggatgatttttctgcatcgctaggttttactgaccgttcctcgaggggaattctggacaccatcgagatgattgagaagtatcgtcttgatattcgcaccgtgaccatgggaatcagcctgttggaatgcgcgcgtggctcgatggaagagaccgcgacggctgtttatgatcgcgtgacgtcacaggctgcacgtctggttgaggtttgtgaaggcattgagcgtgaattgggcattcccattgtgaataagcgcatctcggtgactccaattgccctggtgactgctggttgcagtggcgatcccgttgacgttgctcgagccttagataaggcagcaaaagatgtcggagtgaacttcatcggcgggtattcagcactggttgaaaaaggtggaaccacctccgatattcggctgatccgctccattcccgaggcattgagcacaaccgatgtggtgtgtggatccgtcaatgtggcgtcgtctcgcgcgggtatcaacatgaacgcagtcaatgagatgggcaaggtggtcaagcaagcagctgaattgaccaaagatcgctccgccatcgcatgtgcaaagctagtggtctttgccaattctgtgggcgataatccattcatggctggcgctttccacggcattgaggagccggattgtgtggtcagcgttggtgtctcaggaccaggcgtggttagtcgcgcgctgggcaatcttcaaggtgccacccttgatcaagtcgcagaagagatcaagaaagcggccttcaagatcactcgtactggacaactggttggtgcgatggcctcagaacgcctaggagttcctttcggcatcgttgatctttcgctcgctcccactgctgaagtgggcgattccgtggcaaatatccttgaggtcatgggtcttgaccaggtgggcacacatggcaccaccgcggcactcgcactgctcaacgacgcggtgaaaaagggtggcatgatggcctgctcacgtgtcggcggcttgtccggatccttcattccagtttctgaagataaaggcatgatcgatgcggttcgcacaggagcaatttctattgacaagctcgaagcgatgaccgcgatctgctcagttggtttggatatgattgcgatccctggcgacaccccggcggaaactatttcgggcatgatcgcggacgaagcagccatcggtgtgatgaatcataagactacagctgtgcgtgttattcctgttccaggaactgtccctggcgatgaggtagatttcggtggcttgctgggttacgcgccggtcattccagtaaataccgtgggaaatagtgagtttattcaccgcggcggcttcattccagcacccgttcacgggtttagaaactaggagatccggggcctttacct

SEQ ID NO: 2644 - protein, 462 aa, Corynebacterium glutamicum
MDDFSASLGFTDRSSRGILDTIEMIEKYRLDIRTVTMGISLLECARGSMEETATAVYDRVTSQAARLVEVCEGIERELGIPIVNKRISVTPIALVTAGCSGDPVDVARALDKAAKDVGVNFIGGYSALVEKGGTTSDIRLIRSIPEALSTTDVVCGSVNVASSRAGINMNAVNEMGKVVKQAAELTKDRSAIACAKLVVFANSVGDNPFMAGAFHGIEEPDCVVSVGVSGPGVVSRALGNLQGATLDQVAEEIKKAAFKITRTGQLVGAMASERLGVPFGIVDLSLAPTAEVGDSVANILEVMGLDQVGTHGTTAALALLNDAVKKGGMMACSRVGGLSGSFIPVSEDKGMIDAVRTGAISIDKLEAMTAICSVGLDMIAIPGDTPAETISGMIADEAAIGVMNHKTTAVRVIPVPGTVPGDEVDFGGLLGYAPVIPVNTVGNSEFIHRGGFIPAPVHGFRN

SEQ ID NO: 2645 - DNA, 1485 bp, Corynebacterium glutamicum
  CDS (101)..(1462): RXA02221
ttcaatgatatttgctctgatttttggttctcgtctaatttcattattttgtcacgccagccatcacgacttcatacccaccaattgaaagtaaagtccaatgtttaccgcatccattcctacttatgaattagggtctttcagcaagggctcctacgttgagatcaaaggaacttacttctaccctgacacgctaaatactttatttagaaattctggggcaaaagacaacgaagagttctttgtagacgtaactcttgttccagaaccagataatccgcatagcactcgaggccatgccatttcagtccgctggaatgatctcgtaataggacatattgcctcggatatgactgaaaaattccaacaagtgcgacgagttgcagctagtggctacgatgctcgagtctctgctcggatttggacgaatacaaactataagaatgaacgagatttttgggtatctgttaagctccccgatccagatttccttgttcctcttaatgatcctccccatgacgggtttaccctcctcccttatggaacagcaatccaagtcaccaaggaatctgatcacatggacgtgctctcagaattcgtgcctccatctggacaaggtcagattctcgtatcgctacacatcattaacgcaggcgtgagaaaagaatgggatggcattgaagttcggctcgataatcaacggatcggagagcttacaaaggccagttcagaaaaattcgcacccgtagtgcgacatttcgatgacctaggacttagtacactatgtcgtgcgctcatcaaggggtcatcactagctgctgaagtaactctatatggagctcgtgcacatgagctttccgaagaagacttagaacctaaaagctcttccccattgcccaggttggttgaataccagtcaaatccgtttaattatcaagtccccaacaggtggcccggcgagcagaatcaacgtgctcctaagtcgcaaaagtcttcttcatcacctttcgcagcgtatcgcgggccatcgcaacctagtaaatcactcacaccgtttgtagcgcagacacctgcgcctcagcctagtgatcgatttattgattgggattcattgcttcaaccggacggaactccaagagctacgccattccaaagaggagtaacccgcgggttaattggcaagcatttttcgaatcaaaaatctccaagaattgactttgcaacggtggggcaatgtgatgcaattctccgaactttcggagagccgaccgacaagctttataaagacggcaggacttcttggcctttgtggtgggcgctcatggcgatagtcacccttctcgtcatgttgctgaactttattccaggaattggtccgatcttcccacttatcggattgatcgtacttggtcatcacttttggactcgccgaaaacttaacccaccattcggtagatcaaaatagatattctcatcaaatatcgc

SEQ ID NO: 2646 - protein, 454 aa, Corynebacterium glutamicum
MFTASIPTYELGSFSKGSYVEIKGTYFYPDTLNTLFRNSGAKDNEEFFVDVTLVPEPDNPHSTRGHAISVRWNDLVIGHIASDMTEKFQQVRRVAASGYDARVSARIWTNTNYKNERDFWVSVKLPDPDFLVPLNDPPHDGFTLLPYGTAIQVTKESDHMDVLSEFVPPSGQGQILVSLHIINAGVRKEWDGIEVRLDNQRIGELTKASSEKFAPVVRHFDDLGLSTLCRALIKGSSLAAEVTLYGARAHELSEEDLEPKSSSPLPRLVEYQSNPFNYQVPNRWPGEQNQRAPKSQKSSSSPFAAYRGPSQPSKSLTPFVAQTPAPQPSDRFIDWDSLLQPDGTPRATPFQRGVTRGLIGKHFSNQKSPRIDFATVGQCDAILRTFGEPTDKLYKDGRTSWPLWWALMAIVTLLVMLLNFIPGIGPIFPLIGLIVLGHHFWTRRKLNPPFGRSK

SEQ ID NO: 2647 - DNA, 741 bp, Corynebacterium glutamicum
  CDS (101)..(718): RXA02227
accgcgtgccataggaggtgtcagccagatagggtgcactatcttgaaaaaccgcgctcaggagaggtgtttgcccagcaatttcggtgggcaggatagggtggaagacgtgaatgcaacgctgattatcatgcctggaagtccggcgctggtacctgaactggcaccagcggatgctgcgggggcgcgcttgttggcgtcgttacgtgcagtttttgatgcggaactggctaatgatgatcgcccgatcgagttggttggctcccgggatgaggcgtggtttaccaagcatgcgggaaatctgcgggcctggggtgcaccgagcgtgcaggtttctgacggacattatttgccggaaattttgcagcgtgtcgcgctgggtggtttcgaatcgcgtgtaactcatgtgcgcgatcggttgggtagcgtcaacgacaacacggttacggtgcttgcccttgacggccccacgggcttgaccacccgcgcgccgtccgcactcgtgcccggcgcgtccaacatcgacgcctggtgccgctcattgctgtctggaaagcccggggaagtgcccagcaccagcacgcttatcgacgcctccctccgcgaaccacagctctggctcgacttatccgccgtggcaacagaagcgtcaactgctcaacttctcgacagcgacgacacacacggcgtgggacgctacgttgctcgctggactttttaacttaagggagatctagatcg

SEQ ID NO: 2648 - protein, 206 aa, Corynebacterium glutamicum
VEDVNATLIIMPGSPALVPELAPADAAGARLLASLRAVFDAELANDDRPIELVGSRDEAWFTKHAGNLRAWGAPSVQVSDGHYLPEILQRVALGGFESRVTHVRDRLGSVNDNTVTVLALDGPTGLTTRAPSALVPGASNIDAWCRSLLSGKPGEVPSTSTLIDASLREPQLWLDLSAVATEASTAQLLDSDDTHGVGRYVARWTF

SEQ ID NO: 2649 - DNA, 660 bp, Corynebacterium glutamicum
  CDS (101)..(637): RXA02230
catcgcatagaatactggtgcaatcgtttacgttcgctattaatgtgacacgtataagccgacacttttaacgaagcgcagaaggagtgagagcaagaaaatgggagaacaacttccgtttgctaatggttcacgctccaacaaactgccgctcatcgtcatcggtttgtgctgcataatgctgatcctgtggcttaaacttcccggcgtactgcttgccaccatcattggggttgccacgatgagtgtgatgcggatgcgcacctccaccccagaaactgcctcgctggttacttctattcggctgtctgcggaagatatttccgatgtgcaacatgagtggcagcagtttttgacctcccccgaggccgatgcgctggctgatcgcacgcttgtccgtcccgcactggcggatccagattgtggcgataaggctatcgagaaatttcattatgaaatcagcaatgccaatcgcttcttgggcaggttggacgctcgtctgcaacaaaacctcgtggtcagtgagctagaaacacttctcaaagtaacggacgagcgcgcactagagctgcgggaaacgtggctggatgcgcgtaaagcggcccagaaacttgggccgaactacaatcgcgaatcttagatctgcacctcaccgagtgc

SEQ ID NO: 2650 - protein, 179 aa, Corynebacterium glutamicum
MGEQLPFANGSRSNKLPLIVIGLCCIMLILWLKLPGVLLATIIGVATMSVMRMRTSTPETASLVTSIRLSAEDISDVQHEWQQFLTSPEADALADRTLVRPALADPDCGDKAIEKFHYEISNANRFLGRLDARLQQNLVVSELETLLKVTDERALELRETWLDARKAAQKLGPNYNRES

SEQ ID NO: 2651 - DNA, 879 bp, Corynebacterium glutamicum
  CDS (101)..(856): RXA02231
taaacacctaaattgagcgctctattccatcaacgcgggggcaatttctcacgtgtaggaaaagtgactattgcctgttaagggagttagactaatcgccatgactagcgatctgaagacaatcggtatggatttcgccaagtggcaagatgcagtggaagcagcaattgcttcacagcgtctcgaggtaacaggcgaggtccgtggcggccagctcatccagttctcggatgattccggcgcccaaattaacattctggctgtcgagccttttgccaccttcgccggctttaactccgcaacagtcgcttacggccacgtcagcatgatcaatgatgtgctgtccctggtcgatatcatcgatcctttcggcacccctgttgccaccattacctgcaaccttgctcaaggcccactgcttgttgatgaaccagtgcagcgctggcagcagatccgcattactgccctgggcattgatgttgaggtccacgacaatgcagatgcttacatccgcaatggtggcgaaactgtcggcatgctggtttctgaaggtgcagagaagattgccagcggcagcggcgctgtcatcccggacgcatccgcagagttttccgcacgcgtgttgtctgcggagtaccgcaccaacactcttaccggccagcgttttatccacgcaacagttgatggcctcttcgcttttgatgtgtgccttcctgatgcaccagaactacctgcccgtgacagcgtgttgtctggcaaagtcatgctgactgctgccgttatccccactgaggtcaccggctgcggtggctccggtggcggctgtggctcaggtagctgtggctgcggcggacactaaaattctgcacaattttttaa

SEQ ID NO: 2652 - protein, 252 aa, Corynebacterium glutamicum
MTSDLKTIGMDFAKWQDAVEAAIASQRLEVTGEVRGGQLIQFSDDSGAQINILAVEPFATFAGFNSATVAYGHVSMINDVLSLVDIIDPFGTPVATITCNLAQGPLLVDEPVQRWQQIRITALGIDVEVHDNADAYIRNGGETVGMLVSEGAEKIASGSGAVIPDASAEFSARVLSAEYRTNTLTGQRFIHATVDGLFAFDVCLPDAPELPARDSVLSGKVMLTAAVIPTEVTGCGGSGGGCGSGSCGCGGH

SEQ ID NO: 2653 - DNA, 1656 bp, Corynebacterium glutamicum
  CDS (101)..(1633): RXA02244
caccaattgttctgggcaatatccaacccccgggaaagaaaatgatgaatgcagcagactgggcgcgtggtgtccaacttgatcaggaagcgaaattccaatgagcctagaaaaatccggcggattccgctccaggactccaaaagcgcagcaggaacctgctaagcagaagccgcaggcgcgtaaatctccgtcaaagaaggccccggctcgggggcaggggcagagtcaggggcagcgccagggccaaagcagtggcaaaggcggcggaaaccgcaagccccctgcgcaggccagggaagtgagggctctgggcgtcgataagccgagagaaattgcgtttgaggtgcttgatcgtgtgcgtaccggtgaggcgtatgccaacttggtgttgccacgactgctgagcaagcacaatctttctggccgtgacgcggcctttgctacggaaattacctacggcaccttgcgtaatgtcggcttgctggatgaggtcattaaggctgcatctgggcgtgaactgtctgatattgatccagaggttttggacgtgctgcgtttgggcgcgtaccaggtgatgtttacccgcgtggaggatcacgctgcggtcgatacttcagtaaagatggtcggtgggctgaagaaattccaggccactggttttgccaatgcaattttgcgcaacatcacgcgcaaggaaccagagcagtggttgaaggaattggagcccgcggaagagttggctcgcgttgcgttccgtactgcgcacccacgctggattgcgcagagtttctcacaggtgctcccggcagatgagttggaagcagcgcttgctgcggactctgagcgcccagtggtgcacttggtggctcgcccaggtgagatcagtgcagaggaattggcgctgatcaccggtggtgacgagggcaagtattccccatacgcggtgtacctcgagggtggcgacccgggtgatattgagccagtgaaggatggtcttgcagcagtgcaagatgagggttctcagctgattgctcgcgccttggtggaaatccccgtggagggcaccgatgccggccgttggctggatatgtgtgcaggtcctggcggtaaagcggcgctcattggtgcgttggctcgcatggatcgtgccaccgttgatgccgtggaggtctctgatcaccgtgcccgactgattgaaaagtccgtgcgtggtttgcccgtcaaggttcatgtgggcgatggccgcaccatcaacttgaccggtggttacgatcgtgcgctagtcgatgcgccgtgttctggtttgggtgcactgcgtcgtcgccctgaggcgcgttggcgcaagcaggaaagcgacattgttgagctcaacaccctgcagtacgagctgcttgaatccgctgtgaacaaggtgcgttccggtggcgtgattgtgtactccacatgttcacctgatctgcgtgaaacccgcggaatcgtggacaaggcactgggggctctggagatcgaagagcttgaggctgcggagttcatgccaggcatgaccgataccggcgatgagaaatcagtgcagatgtggccacaccgccacggcaccgatgcgatgtttgtggcagtgctgcgaaagaagtagacctgtgagctaagtggggt

SEQ ID NO: 2654 - protein, 511 aa, Corynebacterium glutamicum
MSLEKSGGFRSRTPKAQQEPAKQKPQARKSPSKKAPARGQGQSQGQRQGQSSGKGGGNRKPPAQAREVRALGVDKPREIAFEVLDRVRTGEAYANLVLPRLLSKHNLSGRDAAFATEITYGTLRNVGLLDEVIKAASGRELSDIDPEVLDVLRLGAYQVMFTRVEDHAAVDTSVKMVGGLKKFQATGFANAILRNITRKEPEQWLKELEPAEELARVAFRTAHPRWIAQSFSQVLPADELEAALAADSERPVVHLVARPGEISAEELALITGGDEGKYSPYAVYLEGGDPGDIEPVKDGLAAVQDEGSQLIARALVEIPVEGTDAGRWLDMCAGPGGKAALIGALARMDRATVDAVEVSDHRARLIEKSVRGLPVKVHVGDGRTINLTGGYDRALVDAPCSGLGALRRRPEARWRKQESDIVELNTLQYELLESAVNKVRSGGVIVYSTCSPDLRETRGIVDKALGALEIEELEAAEFMPGMTDTGDEKSVQMWPHRHGTDAMFVAVLRKK

SEQ ID NO: 2655 - DNA, 1059 bp, Corynebacterium glutamicum
  CDS (101)..(1036): RXA02255
gtgtgcagcgttgctggcaagttttgctggagcacgaaagcgttaaggagtaggcgtgtcactgacgagtgatatcaaacaagaattggcgcaggtccatgtggccaaaaacagtgttcgtgctgcggaagtgtctgcaattttaaggtttgctggtgagatgcaagctgtcggcggcaagctggtcatcgaagcaaatttggacagcatgcaagtcggtatgaggcttcaggagtttatccaaggtttgtacaactctcgagtcgatgtgcacaccgtgaacccgactgtgagcaggaaaacgccacggtatttggtgcgcatcattgacaatgccgatgaaattgcgcgacgcaccggactggtcaccaggtctggacatgtggttaaaggtctagcgccttctgtggtcagcggaacaatcagtgacgctgaagctgcatggcgcggtgcgtttctagccaatggatctttaagtgatccaggtcgttcctcttcgttggaggtgttgtgtcctggtcaagaatcagcattggcactggttggatgtgcgcgaagaattgggatcgcggcgaaaacgaaagattctcgaggatttgatcgcgtcaatgttcgtgatgcggaagcaattggggcactgctcactcgaatgggtgcccagaaaactcgcatgttgtgggaagaaaaacgcatcaagcgggaaagtcgaactccgcaaaccgggttggccaacttcgacgatgccaatctgcgcaggtcagcccgagcagcagttgccgctgcagcgagggtagaacgcgccatgaagattcttggtgatgatgttcctgagcatttggctgaggctggacagctgcgtgtgcagcaccgtcaggcatcgttggaggagttgggccggttggctgatcctcaaatgaccaaggatgctgtggccggtcgtattcgtcgtcttttgacgatggcagataagcgcgccgaagatctgaagattcctgatacaaattctgttgtgacggaagatttgttggaagaaatttagatgattgaagcctaaaaacg

SEQ ID NO: 2656 - protein, 312 aa, Corynebacterium glutamicum
VAKNSVRAAEVSAILRFAGEMQAVGGKLVIEANLDSMQVGMRLQEFIQGLYNSRVDVHTVNPTVSRKTPRYLVRIIDNADEIARRTGLVTRSGHVVKGLAPSVVSGTISDAEAAWRGAFLANGSLSDPGRSSSLEVLCPGQESALALVGCARRIGIAAKTKDSRGFDRVNVRDAEAIGALLTRMGAQKTRMLWEEKRIKRESRTPQTGLANFDDANLRRSARAAVAAAARVERAMKILGDDVPEHLAEAGQLRVQHRQASLEELGRLADPQMTKDAVAGRIRRLLTMADKRAEDLKIPDTNSVVTEDLLEEI

SEQ ID NO: 2657 - DNA, 636 bp, Corynebacterium glutamicum
  CDS (101)..(613): RXA02266
gaggaaagtagcgctacatctgcatatctacccccttaaaaatgaagcataaaaccgccgtgtaccggccttttattgattttgacgtaagcttgcaccgatgactcaagatgaacacccccgacaggccgactcccatttcaacatgcttttaccggatggaaatgaaaacgcacaccagctttctgtcgctctaaatcaggtggcacatctgttggcctatgatgcggactcttcaattcatcggcctgatgggctaagtctggcgtcctatagaattctcttttcactgtggactgatggcccgatgagtccactccaggtgactgacaagactggaatgaaaaagtctgcgatttctaacctgttaaagccattgctcgctgaatctctgattgtgcaggtgacggcagaaaatgatcgacgctcaaaggttttaagccttagcgaaaaaggcactacatacattcagaaaacagccacccgccaaaatgctttggaatccgagtggtttggcaccctgaccgacatcgagcaggatttattggagtcgttgctcaggaaactgctcgactccaaccgcgcatccaaggttcgtaaaaaccgatctaactagcgtcgatccttagggatgta

SEQ ID NO: 2658 - protein, 171 aa, Corynebacterium glutamicum
MTQDEHPRQADSHFNMLLPDGNENAHQLSVALNQVAHLLAYDADSSIHRPDGLSLASYRILFSLWTDGPMSPLQVTDKTGMKKSAISNLLKPLLAESLIVQVTAENDRRSKVLSLSEKGTTYIQKTATRQNALESEWFGTLTDIEQDLLESLLRKLLDSNRASKVRKNRSN

SEQ ID NO: 2659 - DNA, 996 bp, Corynebacterium glutamicum
  CDS (101)..(973): RXA02267
tgcgctcggcaagtgttttgcttatcgacgtctccccacataacaatcccaactcgaagcaccaacgattcaagccttatcagttttgtacaggaaaatagtgcaaaaatggggtttaagcttcgtggagaggattgtcatcgtgaacaacgtgcaacagtttcatcgattttttgatgattccgcagtctattatccctgcttcgtcccgcttgaccgagccatcggcgaacactttgatcgtcagaacaaaccgatgtccagattcatcggaacgctcattctgccgttagccaaactggaagaagccgcccaatacaccggcgatgaagtccttcgcgtgtcggcagtaatcagtactgatgggctcgctgatctgcgaagggatttttacgaactccccaacatcgacatcgcctcggtggaaatcaagctggtcggcgcagccctcaccaacaccgcttggttgggagatgtggaaaaactcatccaacaacatcgcaacactttcgtatgggttgagattccgacagccctggtcaccgcagatattgtccgaaaactccgccacatgggagctggcctgaaatacagaactggaggtgatagggaagagctcttcccctcaccgcaggacttggtcactgtgctgcgcaccgccatcgatgctgcattgccgtttaaactcactgcaggcctgcatcgtgctctcaggtatcgtgacgagaaaaccggccgacttcacttcggattcctcaacattgcagccgccgtggcgacacttcgtgctggaaaaggcgaggcagaggcactgaagatccttgaaggcgatgatgccgctccgcttattcacgcactacaaagcggcgaaaactggcgggattccttccgcagcttcagtacctgcaatgttgttgaaccactcaacactctgattgatcttgatgtgttggcggaaggagacgtacatccctaaggatcgacgctagttagatc

SEQ ID NO: 2660 - protein, 291 aa, Corynebacterium glutamicum
VQKWGLSFVERIVIVNNVQQFHRFFDDSAVYYPCFVPLDRAIGEHFDRQNKPMSRFIGTLILPLAKLEEAAQYTGDEVLRVSAVISTDGLADLRRDFYELPNIDIASVEIKLVGAALTNTAWLGDVEKLIQQHRNTFVWVEIPTALVTADIVRKLRHMGAGLKYRTGGDREELFPSPQDLVTVLRTAIDAALPFKLTAGLHRALRYRDEKTGRLHFGFLNIAAAVATLRAGKGEAEALKILEGDDAAPLIHALQSGENWRDSFRSFSTCNVVEPLNTLIDLDVLAEGDVHP

SEQ ID NO: 2661 - DNA, 776 bp, Corynebacterium glutamicum
  CDS (1)..(753): RXA02280
gcggacctggctgaaaccatgttgggtcttctcaccttggagacctcccgtggtcgcatctcgatcggtgagatcaccacgttgtccatcaccgaggatgtgtcgctgcagctggctaccacgttggatgatttcaggcagctcaacaccattgcgcgcccggacaccttgattattaatggcggctacattcacgacagcgatctggctcggctcattcccgttcactacccaccgcttacggtatctactgctgacctgcgcgaatccatggatctgatggagcttccgccgctgcaggacattgagaaagccaaggcactggatgcgcaggtcacggaatcattgaaggattttcagatcaagggcgcaacgagggtttttgaacccgcagatgttcctgccgtggtgatcattgattccaaggcgcaggcctcacgggatcgcaatgaaacacaaagcgcaaccactgatcgttgggctgacattttggcaacggtggataacacgttgagccgtcaaacagccaacattccacaggatcagggactgtcggcgttgtgcttgaattggaacaattcgctggtcaggaaattggcgtccactgatgacaccgccgtggtgtcgcgcacggtgcgtttgctctacgttcaggcattgttgtccagcaagaggccactgcgggtgaaggaacgcgcgctgcttaatgattcgctggcagatctggtttctttgtctttgtcatccgatatctaagacaatcctccgctaatctt

SEQ ID NO: 2662 - protein, 251 aa, Corynebacterium glutamicum
ADLAETMLGLLTLETSRGRISIGEITTLSITEDVSLQLATTLDDFRQLNTIARPDTLIINGGYIHDSDLARLIPVHYPPLTVSTADLRESMDLMELPPLQDIEKAKALDAQVTESLKDFQIKGATRVFEPADVPAVVIIDSKAQASRDRNETQSATTDRWADILATVDNTLSRQTANIPQDQGLSALCLNWNNSLVRKLASTDDTAVVSRTVRLLYVQALLSSKRPLRVKERALLNDSLADLVSLSLSSDI

SEQ ID NO: 2663 - DNA, 672 bp, Corynebacterium glutamicum
  CDS (101)..(649): RXA02286
gcagcgcacacgctttcccctcagcctgctgatacccccgttttgccacctaaaacaacctctcatcttcatttcatattcacttcatagggttgaatacatgaagaacgcaaaacttttcctcgcgctcatatccgctcctcttatcctcgctggctgcagctccaccgatactggaacagcagaatccaccatttccagcgaaactgcttctgcagtagatgccaccacttctacctcctcaagtaccgccacctctgccgtgattgatgacgatccggtattcgacatcatcgacatcgtccttgcccaataccccgacaggatcatcaccgacattgaccgcgaagactcctccgatcaatacgaagtcgatgttgtggttggccaagaagtccttgaacttgatgtcaccaccagtggccagatccataccgacgaccgcgacaacgatgatgatgacgacatccgcgaagctcacgcagccacagtcaccgcagctcaagccattggcctagcgctggatcaatacccagacggaattattgattctgttgaattagacgaagacgacggccagctgaaatggaaaatagacctcgatgacacttccggcaatgatcttgctgacgttgaaatcgcagcagtttaagcacgcgcacggaaagccac

SEQ ID NO: 2664 - protein, 183 aa, Corynebacterium glutamicum
MKNAKLFLALISAPLILAGCSSTDTGTAESTISSETASAVDATTSTSSSTATSAVIDDDPVFDIIDIVLAQYPDRIITDIDREDSSDQYEVDVVVGQEVLELDVTTSGQIHTDDRDNDDDDDIREAHAATVTAAQAIGLALDQYPDGIIDSVELDEDDGQLKWKIDLDDTSGNDLADVEIAAV

SEQ ID NO: 2665 - DNA, 675 bp, Corynebacterium glutamicum
  CDS (101)..(652): RXA02287
ttgaaaaaggaacattagtgccagtaacaagagcccagttgaattcaagcgggcagagacacatctggccctcaaaattttccttttactggagaccactgtgtactcaatttcagaaactatcgcccgaactcttatgccccgcaccgatcacgttttcgacctgatgggcaacggaaacgcctggttcgtcgatgccctagaacgcctcgggcgaggcatcatcaccgtccgccccacagttgaaaccgtggccgccgcggacacctaccaccgcgtcacccgccgcccggcggtcgctaccaccacctatggtgctggtttcaccaacaccatgaccacgcttgccgacgtcgccctctcccgtatcccacttcttttagttgtgggcactgccccgagcgccgggcctcgctgtttcgacattgaccggcaaggactcgcacgtgccgtaggtgtggaaaccttcaccgtgcatgcagatgacgttgctgcggtaactcttcaggcttggaataatacgccggaaaacacacacgtgatcctggaaatcccctatgacctagcagctgccacagccaccgatccaacagtgactacatacctgctgcgccccggatttcagaaactcccgatgtcaccgaccttgtcctagctctacgcaatgcccaaaat

SEQ ID NO: 2666 - protein, 184 aa, Corynebacterium glutamicum
VYSISETIARTLMPRTDHVFDLMGNGNAWFVDALERLGRGIITVRPTVETVAAADTYHRVTRRPAVATTTYGAGFTNTMTTLADVALSRIPLLLVVGTAPSAGPRCFDIDRQGLARAVGVETFTVHADDVAAVTLQAWNNTPENTHVILEIPYDLAAATATDPTVTTYLLRPGFQKLPMSPTLS

SEQ ID NO: 2667 - DNA, 498 bp, Corynebacterium glutamicum
  CDS (101)..(475): RXA02294
tacctcacctggcaacaaatccaaggaatgtagataagtcggggcaaactctaagaaatcatcctggtttgtggcagggaacattcctaggatgggaggcatggcaaagacaaaactagaaagcatctccgagcgcaactcggatgatccgcttagttaccccgacctgactcttgcaccaatatccacaacagtcacagtcgtggtcgccgaagacaccccaaacgataacttctcagaacttctcctcggcgcagcagaatcaacccgtcttttaggactcgacgagctccacatcatcgctccatcagtccacctacccgctctcgcagtagcagccgccgacatcgcacaccatctgccagagaaattccaattctgtgaagccgaaacctgcactcatctccaccccgacgatgacacctatctcacggctgaatccgttgctcaattgggtacgaagctgaagtctgcgtagttgttaggagccaccacaga

SEQ ID NO: 2668 - protein, 125 aa, Corynebacterium glutamicum
MAKTKLESISERNSDDPLSYPDLTLAPISTTVTVVVAEDTPNDNFSELLLGAAESTRLLGLDELHIIAPSVHLPALAVAAADIAHHLPEKFQFCEAETCTHLHPDDDTYLTAESVAQLGTKLKSA

SEQ ID NO: 2669 - DNA, 903 bp, Corynebacterium glutamicum
  CDS (101)..(880): RXA02295
ttcccatgctaatccgcgaaaatggcacttcaacagccatatactttaaacaacacaaatgatgcaagactgataccgggatgtgataggagcgcaccacatggggttggaattagcagctagcgggtggggcatcctcatcgcaggcgccgccgtagccggatggatcgacgcagtaatcggcggtggcggactcgtcctcatcccgctgatcctcgcggtcatgccgcaactcgcacctgtgacagcgctggcctccaacaaactggcagccgtcaccggcacggcatcggcggcattcaccctggtcaggcgcgtcaaacccgacaaaaaactgcttgcgctctacgttctggtggcagctgtgtgctccggtgcaggcgccctggctgcgagtctcattgacaaacaaatcatgcgaccgctgatcatcgtgttgatgctggtcgttggcctgatcgtggtgttcaaaccaaacttcggaaccggcgaaagcaaagccctgcccaccggatggaaacgctgggccgccatcgttgcagtcggactcatcgcagcctacgacggcatcttcggacccggaaccggcatgttcctcatcatggcgttcaccgcactgctctcccaaaatttcctgtcctccgcagccatggcgaaggtcgtaaacaccgcaacaaacctgggtgcgctaattgtattcatcatcggcggccacatgtggtggaccctaggactcgtgctggcagtcgccaatgtcgcaggcgcacaactcggtgcccgaacggtgcttggtggcggtaccaggctaattagatacgcactactaaccctggttgtcgtcatgagcgtctacctcacctggcaacaaatccaaggaatgtagataagtcggggcaaactcta

SEQ ID NO: 2670 - protein, 260 aa, Corynebacterium glutamicum
MGLELAASGWGILIAGAAVAGWIDAVIGGGGLVLIPLILAVMPQLAPVTALASNKLAAVTGTASAAFTLVRRVKPDKKLLALYVLVAAVCSGAGALAASLIDKQIMRPLIIVLMLVVGLIVVFKPNFGTGESKALPTGWKRWAAIVAVGLIAAYDGIFGPGTGMFLIMAFTALLSQNFLSSAAMAKVVNTATNLGALIVFIIGGHMWWTLGLVLAVANVAGAQLGARTVLGGGTRLIRYALLTLVVVMSVYLTWQQIQGM

SEQ ID NO: 2671 - DNA, 1260 bp, Corynebacterium glutamicum
  CDS (101)..(1237): RXA02297
tgctgatcacgcctgactcctatgaagtgttgaccgattccgctgctaaagtgaaagcgacattatgaaataaacgtggatcaaggagtccggtgcccaattgagcgataaagaaccagacccccacgaacaaattccagagaagccatcccgcaaggttattgcacttcgttggtgcatcgtagcgccgctgtcgctagccgtggggtggctttttactatgtggggtgtgccagccgcatggatcctcggggcgatccttgttgccggtgtatgtgcgctgaccacagggcaagatcttccgatggccaagggggtgcatgtttttggtcgctcaatcgtggcgatgctggcggcgctgcctttgattagttcttctggttcggaacttgttcgtttcctcatcccgggtcttgtgatttcctttttcaccatcgcggtaggcatcgttggtggtttgttgctggcaagatccaggccggagattttgccggaaactggtgtgctgtccatgctggcgggtggcgcgtcggtgatgccgattctggcccgagagttgggcgctgatttccgctatgtggcgctgacgcagtacctcaggttgttggttgtgtccatgacgttgccgctggtgacgcactttttcgtccctggcggggcggatttgggatcgccgcctgagaaatggttggacgtgttgagtttgggagagttcgggacgtcgataagcgttttatcgctgctggtgctcttcggtattgtgctggccggcgaacctctcggcaggttgctgcgcttgcctgcccctgcggtgatggggccgctgatcctgaccgtgctggtgagttttgtgattccagatgatctcagcctgcaaccgccaaccgtgtttaagattatcgcgttcatggcgatcggttggatgtgtggcggtcccttgaatatgaccgcgctgaaggtgttttctaagcagcttccggccacgttcttgtttattttcgcgctgcttgcggtgtgcgcaggtgcggcggggctgctcacctggtggttggatatcagcttcttcgaggcttacctagcaaccagccctggagctctggagacggtgttggcgctgtcctcggaaggatctgcaggcccggtggtggtcacgatccagatcattcgactactggcaatcttgaccatcgccggtttgatccccacgctactgcgacgcattttgcgtagggatcgttaaaggccttctagttcagcacc

SEQ ID NO: 2672 - protein, 379 aa, Corynebacterium glutamicum
LSDKEPDPHEQIPEKPSRKVIALRWCIVAPLSLAVGWLFTMWGVPAAWILGAILVAGVCALTTGQDLPMAKGVHVFGRSIVAMLAALPLISSSGSELVRFLIPGLVISFFTIAVGIVGGLLLARSRPEILPETGVLSMLAGGASVMPILARELGADFRYVALTQYLRLLVVSMTLPLVTHFFVPGGADLGSPPEKWLDVLSLGEFGTSISVLSLLVLFGIVLAGEPLGRLLRLPAPAVMGPLILTVLVSFVIPDDLSLQPPTVFKIIAFMAIGWMCGGPLNMTALKVFSKQLPATFLFIFALLAVCAGAAGLLTWWLDISFFEAYLATSPGALETVLALSSEGSAGPVVVTIQIIRLLAILTIAGLIPTLLRRILRRDR

SEQ ID NO: 2673 - DNA, 1782 bp, Corynebacterium glutamicum
  CDS (101)..(1759): RXA02298
aaatcatagcgtgagatgacaaggaaaggaatatttcgatccggcaacaacccccgcgtcaggtgggattatgccgaaaaaatcgctacgatagccacttatgactcttcagagttctgataaacgttctccttcactgttagacgcctcctccgaggtctttgtccatgatttggcagctttgtctcccactgatgccactgcatggggtatctcaggcttcgaaggtgatcttcaggatttctctcctgactattggaatgccatcgccgaacgcaaccgcgacatggttgccgatgttgatgcttttgatgacggcactgatgacaacgatgacgaagaagatttcgatgacgttgaccgcgtcaccgctgatgttctccgtgatcgcgtatgcctggatctggccctgcaccaccagggcgaaaccttagcgaatctcaacaacattgattccccagtccagaccatccgcgataccttcctcatcatgccccgcgagacggacgatgatgtggaaaatctccgcgaacgtctctcccgcgtccccgacgctctccacggatactgtgaatcactcgctgaggctgccagccaaggccatgttgcagcggtccgccaggtggaagaagtggtgtcgcaatgtgaggacctcgctgatgaggactccgttttgcagcaccttggcttggatgaaaatgatccagtagttgtagaggcccaggaagcttttgcacgagttgccggttggttagcagagcaactggctccgcatgctcctcatgtggatgcggttggccgggatcgctatgaaatgttctcccacctgcacgtcggcgagtttgtagatctggatgaggcttaccaatggtccctggaacagctgcgtgacattgatgctcagcagcttcaggtagcccagcagctgtacggccctggcaccacgatccgtgaggccatgaagaagctcaatgctgatgagcgctacctcatccgaggcactgatgctctgcaggagtggatgcaaaagaccgctgatcaggcaatcgctgatctagatggcgtttccttcaacattccagagcaggctcgacaggttgagtgcctcatcgatcctgctggaactggcggcattttctacaccccaccaagcgatgatttctccaggcctggccgcatgtggtggtctgtgcctaaaacccaggaagtcttccacacctggcaagagctcaccaccgtgttccacgagggtgttcctggccaccacctgcagatctcccaaactttggtggaaaaggatctgaacctgtggcgtcgagtcgcttgctggaactctggccacggtgaaggttgggcgctgtacgcagaatctctcatgaaggaattgggataccacgaagatccaggcaacctcatgggctaccttgatgctcagcgactccgtgcagcccgcgtggccattgacatcggaattcacctgaacaagaggaacccagagtgcaccggcctgtgggatgcgtcttatgcgcgcagcttcctgcgtgaaaatacgtccatgaatgaagatgcgctgtactttgagctcaaccgttaccttggttggccaggtcaggccgcatcgtatgccattggtcagcgactctggttgaacctgcgcgatgaggccattagccaggggcaaaccttggcgcaattccacagcaaggcattgtcctatggcagcatcccgatgggcattttgcgcgatcaggtgctgaactagaaggcctttaacgatcccta

SEQ ID NO: 2674 - protein, 553 aa, Corynebacterium glutamicum
MTLQSSDKRSPSLLDASSEVFVHDLAALSPTDATAWGISGFEGDLQDFSPDYWNAIAERNRDMVADVDAFDDGTDDNDDEEDFDDVDRVTADVLRDRVCLDLALHHQGETLANLNNIDSPVQTIRDTFLIMPRETDDDVENLRERLSRVPDALHGYCESLAEAASQGHVAAVRQVEEVVSQCEDLADEDSVLQHLGLDENDPVVVEAQEAFARVAGWLAEQLAPHAPHVDAVGRDRYEMFSHLHVGEFVDLDEAYQWSLEQLRDIDAQQLQVAQQLYGPGTTIREAMKKLNADERYLIRGTDALQEWMQKTADQAIADLDGVSFNIPEQARQVECLIDPAGTGGIFYTPPSDDFSRPGRMWWSVPKTQEVFHTWQELTTVFHEGVPGHHLQISQTLVEKDLNLWRRVACWNSGHGEGWALYAESLMKELGYHEDPGNLMGYLDAQRLRAARVAIDIGIHLNKRNPECTGLWDASYARSFLRENTSMNEDALYFELNRYLGWPGQAASYAIGQRLWLNLRDEAISQGQTLAQFHSKALSYGSIPMGILRDQVLN

SEQ ID NO: 2675 - DNA, 1014 bp, Corynebacterium glutamicum
  CDS (101)..(991): RXA02304
ctagccatcattggtagttcctaattgtttccgtacagtatagctccagcacaacttctgagtgcaagttttttataacagggcagtaacgtttactggtatgaaaactccccgtctgctgaagatcctcagcgcgatggtggctgtcactggacttctcattccaacggtggtccccatggccgccgctgatgctgctgaactgtccgacaacgttcccgatcgcacccaaattgccatcatcaaccctgatggcagcgtgcaagaatctgacaacgccgaagaatcccgcccggcattatccctggccaagctgtatttgggttattatgtgttggctcaaggcgcggaagaagatattgaactagtcccagatatgatccgctactctgatgatttcaccgcggattatttggagagcgaatacccggaagcaattcctgaggttattgatgccttcgatttggaagacaccgaatgggctggtttctggggcaatgcaactaccagtgcggtggatattgcgacgtttgtagcagcactcatcgacgatcccacggcgcagcccttgcttgacgcaatgtctgacaccgctgagtatgcggcggatggctacgcccagaactttggcacttttacattgtccgatgtcaccggtactaaatttggttggtctgattccctcgatgtgcattcatcggtcagctttggccctggttttgtgatcgctgccaacacctacggtgacgccgaaacgctcaccgaagatgtccaagattccgtgtcttcgctgtatccggaggaagtaaccaccgcgatcgaggagcaggtggatcagctgtgtgagtgcgctgcagagactacgcatttgggaatgcacactggcgcggagctgaaagcacagcttgagggcactatttatggaaaaaccctcagctttttacctaattcagccccagcgccagcgtttatttacaacctgctggcacattagcaaacagttttaaggaactc

SEQ ID NO: 2676 - protein, 297 aa, Corynebacterium glutamicum
MKTPRLLKILSAMVAVTGLLIPTVVPMAAADAAELSDNVPDRTQIAIINPDGSVQESDNAEESRPALSLAKLYLGYYVLAQGAEEDIELVPDMIRYSDDFTADYLESEYPEAIPEVIDAFDLEDTEWAGFWGNATTSAVDIATFVAALIDDPTAQPLLDAMSDTAEYAADGYAQNFGTFTLSDVTGTKFGWSDSLDVHSSVSFGPGFVIAANTYGDAETLTEDVQDSVSSLYPEEVTTAIEEQVDQLCECAAETTHLGMHTGAELKAQLEGTIYGKTLSFLPNSAPAPAFIYNLLAH

SEQ ID NO: 2677 - DNA, 552 bp, Corynebacterium glutamicum
  CDS (101)..(529): RXA02308
gggtgagattggaatgatttcggcccgggcgctcgaaaaccgtgatagacacaatgaaccgagcaaatccgccaggaaataaattaagtaaggaatatccatgagtgaaacccagtcgaattcagtgtcagcggtaatgcctgcgcagctccctccagggcctgccgagcgtactgtgtactcctacggtgttcgcgcaggggatcaggtgcacattttaagaatggaggcttttgattctgacgcgaatattgtcggcgaaagggacattgaggcgcatgctgaacaagtctttaagaacctgcaagcagtaatccacgaggcaggaggaacgatcaacaacattgtttccaccactacttatcttgccgatgtcaccgatgctcccgttgttaacgctgctcgctcccgctatttcaccggagaagtattgcccacccacaccgtaattggagttgctgctcttgctcggccacagtttctagtcgagatctcagcggtggcctatttgggggacctttcaaaagactagatacatgattatttttgcat

SEQ ID NO: 2678 - protein, 143 aa, Corynebacterium glutamicum
MSETQSNSVSAVMPAQLPPGPAERTVYSYGVRAGDQVHILRMEAFDSDANIVGERDIEAHAEQVFKNLQAVIHEAGGTINNIVSTTTYLADVTDAPVVNAARSRYFTGEVLPTHTVIGVAALARPQFLVEISAVAYLGDLSKD

SEQ ID NO: 2679 - DNA, 1209 bp, Corynebacterium glutamicum
  CDS (101)..(1186): RXA02324
gaaggtcaaaaaacttgactttattgaaaacaatttccattaagaagtgtacacttgcgtcgactctattgaaaatgattcccaaaaggagggctttcacatggccacaacgaccccagtcaccgtgctatcaggatttctcggctccggaaaaaccacattgctcaaccagatcctccaccaccgaggatcccggaaaatcgcagtcattgtcaacgatttttcagaaatcaacatcgacgcagccctcatcgcatccgaaggccacctcacccgcggcgaagaccgcttcgtggaactgaccaacggatgcatctgctgcaccctgcgcgaagacctcgtggattccgtcggcgaactcgccagcagcgaccgcttcgaccacatcgtcatcgaatccacgggtatctccgaaccaatgccggtagccgccacatttgaatggcagtgggatgacggcacccgcctggctgacaaagcaccgatcgacaccatggtcaccctggtcgatgccacccaattcatcgacctcatccgcaaaaacacctccctcaccgaggctgacatgggcgcaaccgaggacgatgaacgcaccatcgccgacctactcaccgatcaaatcgagttcgccgaccgcatctacatcaccaaatccgacctggtggaccgcactgtcctcgagcaaacccgcgcactaatcgccagcatgagtccacgcgcccgcattgacttactcatcgatggcctcaatgacggctcccccatcaccgacgacatcctcggagctttcctctacgacgaagccaccgcccgcgcctacgagggctacacggaagaactcgaaaacccgcacactcccgaaaccgaggaatacggcatcagttccgtggtattccgctctgaccggccgttcaacaaggatcgcctacttcaggtactgcgttccaccactggactcgttcgctccaaaggctattgctggatcgctgatcacctcaacatcgtccaggtctggcaccaagccggccccaatttgagcattcgcccggccgcctattgggccaattcagagatcacccccggcactgaattggtcctgatcggcatccacatcgacggccccaccttgctcgcactgctacaaggcgcgacgcttaccgatgcggaagtggcggcactggttttgtgagttcctcaagtccgtgaatt

SEQ ID NO: 2680 - protein, 362 aa, Corynebacterium glutamicum
MATTTPVTVLSGFLGSGKTTLLNQILHHRGSRKIAVIVNDFSEINIDAALIASEGHLTRGEDRFVELTNGCICCTLREDLVDSVGELASSDRFDHIVIESTGISEPMPVAATFEWQWDDGTRLADKAPIDTMVTLVDATQFIDLIRKNTSLTEADMGATEDDERTIADLLTDQIEFADRIYITKSDLVDRTVLEQTRALIASMSPRARIDLLIDGLNDGSPITDDILGAFLYDEATARAYEGYTEELENPHTPETEEYGISSVVFRSDRPFNKDRLLQVLRSTTGLVRSKGYCWIADHLNIVQVWHQAGPNLSIRPAAYWANSEITPGTELVLIGIHIDGPTLLALLQGATLTDAEVAALVL

SEQ ID NO: 2681 - DNA, 993 bp, Corynebacterium glutamicum
  CDS (101)..(970): RXA02325
gggcagagatttgaagatggagaccaaggctcaaagggaatccatgccgtcttggtttaatactgcacccgtctaatgaaaatcattactattaggtgtcatgatggaccatgcacacgattcctgctcaccaactctgcgccgtgatttggaggtcactggccagctccaacctgagaaagctgtcgatttagcagcgccgcacgaagggaaggttgccaatataacgaaggtgacctcctcaaatatggagcacaccatcacgcaggcctcaaaagctaaggaggtggtggtgctcattggtcactccctgctgcccacatttcaggatttggaaaaagacattctgcactttcaggcaggtaataaagggcgattttctgtagcgattgttgatcctgatcgcagtgcagatgtggttgccagatttaggccaaaacagattccggtggcatacgtggtgaaagatggcgccagcattgcggagttcaactcgctcaacaaggagccggttgcacaatggcttgatcattttgtgtcgcgggaaacgatccccaatgaaaaagagggggacgtcgataagcaaatagacccgcgcctgtggcgggcagcggaattggtgaacgccggtgattttcgcgcggcgttggcgttgtatgagcagttgccgcaggatgcgacggtgaagcgggcgcacgcggcggtgtcggtattggcgcggatgtctgtggcggatcggggagaggatccgatcgagaagtcgcgccgggatccagacgatgtgaacaaggcgctggcggcggcggatatgtatgtgttgatgaatcagccggacacagcgctcgcgcaccttgcagcactattgccaaaaccggaggctgcccggcggatcgtggagttgctgaacttgtttgatccgctggacctggtcgcattggaaatcagggcgcaggtggggaatgcaatgagctaagaaaacactttaaatattct

SEQ ID NO: 2682 - protein, 290 aa, Corynebacterium glutamicum
MMDHAHDSCSPTLRRDLEVTGQLQPEKAVDLAAPHEGKVANITKVTSSNMEHTITQASKAKEVVVLIGHSLLPTFQDLEKDILHFQAGNKGRFSVAIVDPDRSADVVARFRPKQIPVAYVVKDGASIAEFNSLNKEPVAQWLDHFVSRETIPNEKEGDVDKQIDPRLWRAAELVNAGDFRAALALYEQLPQDATVKRAHAAVSVLARMSVADRGEDPIEKSRRDPDDVNKALAAADMYVLMNQPDTALAHLAALLPKPEAARRIVELLNLFDPLDLVALEIRAQVGNAMS

SEQ ID NO: 2683 - DNA, 489 bp, Corynebacterium glutamicum
  CDS (101)..(466): RXA02331
tgcagcgtgcattcccaccatcgggtcaagaatctatccgcccagcccctgtccaactcctcaactaaaaaggcagcacttaaaaaacactatggaacccatggaactaaacggcggtcgtttctacgcccgcaagctcacctcagataatcggattgatgatgtcccggcgctctcactgatccttgccgatgcagcacagttcatcgcggacgccaccacagcctggcacgaggacaccgaatacacctgggctatctgcgagcagaccagtgttgaactactggcactggcacgccttgatcccaagcagcgcacactcgaggtcgtgcccgcaggtgatcccgccacccaattgcccaatgatccagtgctcgctccgaaaaccatcggcgatgctgtggcggagggccgcgacaccatcaccagatgggcacaaggctatttagaaatcagcctcactgattaggttctctccgaaatgggcac

SEQ ID NO: 2684 - protein, 122 aa, Corynebacterium glutamicum
MELNGGRFYARKLTSDNRIDDVPALSLILADAAQFIADATTAWHEDTEYTWAICEQTSVELLALARLDPKQRTLEVVPAGDPATQLPNDPVLAPKTIGDAVAEGRDTITRWAQGYLEISLTD

SEQ ID NO: 2685 - DNA, 303 bp, Corynebacterium glutamicum
  CDS (101)..(280): RXA02336
caaatccacacgacacaattacacaaattttaccttgtgcattgaaagccgtcagccgattagcgttaaagaaaataaaaaaccacaaggggagcacaccatgaaagacaccaccgagatcaactggcaaggctacgccgatggaaccgcaatccgcgaagcagtcatccactccattgaacgagaagtatcagcgggcgagcagccaaccccaaacgatcttaaatttctcgggctgttccagcaccgcgccgggtatgtgggctcgttgatcaccggttaagtgtggggagcaggctggct

SEQ ID NO: 2686 - protein, 60 aa, Corynebacterium glutamicum
MKDTTEINWQGYADGTAIREAVIHSIEREVSAGEQPTPNDLKFLGLFQHRAGYVGSLITG

SEQ ID NO: 2687 - DNA, 444 bp, Corynebacterium glutamicum
  CDS (101)..(421): RXA02347
acggttggaacagagctgcacctttaatcaggcagttgctggccaactgagttagcctaaaacgatgaagaaaaatcctttggttgaatgggtctgggttatggatgaactcggggttggctggtgccaatgcgagaaagattccatcaccggaaaagcaccacatcccgtgaacaagccactggtcaccaaatccattatcagggctctaggcgatgtccccgatgtcatgagcaaccaggacatcagccttgtggtggtggatttgtggaaattcgataccattactcctccaatcgcagaatccctcatgcgttccgtcaaagctgttaacggtgagatgcacccgcagtatcccaccgcgacagcaatggctgcgatcaagcatttctccaacacttttgatggacagattaacgcttaaaaggcctgttatagactgat

SEQ ID NO: 2688 - protein, 107 aa, Corynebacterium glutamicum
MDELGVGWCQCEKDSITGKAPHPVNKPLVTKSIIRALGDVPDVMSNQDISLVVVDLWKFDTITPPIAESLMRSVKAVNGEMHPQYPTATAMAAIKHFSNTFDGQINA

SEQ ID NO: 2689 - DNA, 490 bp, Corynebacterium glutamicum
  CDS (101)..(490): RXA02349
cttcgagtgctgtggcgaaaaatccgaactccaaagaactagcctaagaactagccccatgagctatccctcaaaaaattactgatagtgaggttttcgcatgtcaactgcatattttattgcgcacggaaacgatacgtaccgcccaacggagcattccagcggtgcgtggcgcgatgatgaactccaccttgcaccggttgccggtttggtgattcaccatatggaacgttggcgcagggaagtggttggcgatgctttggtgttcagccgttttagtttggaggtcttgggccagatcgctcgggatgatgtcaccttgagaacagagatcgttcgtcccgggcgcaccattgaacttattgaaaccgtggctgaaatcaacggcagagtgacgattcgtgcacgcgcctggttgctgaagacctctgatcttgcccatatttctggcgatacttttgaagcgttgccgtcaatgactgaactggca

SEQ ID NO: 2690 - protein, 130 aa, Corynebacterium glutamicum
MSTAYFIAHGNDTYRPTEHSSGAWRDDELHLAPVAGLVIHHMERWRREVVGDALVFSRFSLEVLGQIARDDVTLRTEIVRPGRTIELIETVAEINGRVTIRARAWLLKTSDLAHISGDTFEALPSMTELA

SEQ ID NO: 2691 - DNA, 578 bp, Corynebacterium glutamicum
  CDS (1)..(555): RXA02352
atctacaacacatcgagcacgctcaacggcttcatcgcagacaaagacaactccctgcaatggcttttcgacgtccccggcagcgacggtgcctctgaagacttcggtaatttcctttcaaaagccggcaccatcgtaatgggatccaccacctatgaatggctgctcaaggacctagatttcatcagcgatccccacaagtggaccgatgtgtatggcgatcgccccacgtgggtgttcagcagcaggaacttggaaaccccggaaggaaaacctgtcaaggtagtaaatggagatgtcgccgatgttctccccgccatactggaagagagtccagagaacactgatatttggatcgtcggtggtggcgatctggcgggtcaattctttgatgcgggtgcactcgatcggatcatcttgaccatggcgccagtgtttctcgatgaagggcagccagcgatgccccgccggatcgaaagtaatcgtctccgcaccgtaaatgtccgcgaggttggacaattcaccgagatcaccctggagacgattaaaggggcttaatttgtagagttttgggcaga

SEQ ID NO: 2692 - protein, 185 aa, Corynebacterium glutamicum
IYNTSSTLNGFIADKDNSLQWLFDVPGSDGASEDFGNFLSKAGTIVMGSTTYEWLLKDLDFISDPHKWTDVYGDRPTWVFSSRNLETPEGKPVKVVNGDVADVLPAILEESPENTDIWIVGGGDLAGQFFDAGALDRIILTMAPVFLDEGQPAMPRRIESNRLRTVNVREVGQFTEITLETIKGA

SEQ ID NO: 2693 - DNA, 1119 bp, Corynebacterium glutamicum
  CDS (101)..(1096): RXA02356
ttggcagtagccatgcgttctgctcctgaccttgaacagcggtcccaatttagacccgctaaacccacaatgtgtactggtgctggtaatttagtagaacatggcaacggtcacattcgacaaggtcacaatccggtaccccggcgcggagcgcgcaacagttcatgagcttgatttagatatcgctgatggcgagtttttggtgctcgtcggcccttcgggttgtggtaaatccactacgctgcgtgctttggcggggcttgagggcgtggagtcgggtgtgatcaaaattgatggcaaggatgtcactggtcaggagccggcggatcgcgatatcgcgatggtgttccagaattatgctctgtaccctcacatgacggtggcgaagaatatgggttttgcgctgaagttggctaagctgccgcaggcgcagatcgatgcgaaggtcaatgaggctgcggaaattcttgggttgacggagtttttggatcgcaagcctaaggatttatcgggtggtcagcgtcagcgtgtggcgatgggtcgcgcgttggtgcgtgatccgaaggtgttcctcatggatgagccgctgtccaacctggatgcgaaattgcgcgtgcaaacccgcgcggaggtcgctgctttgcagcgtcgcctgggcaccaccacggtgtatgtcacccacgatcaggttgaggcaatgacgatgggcgatcgggttgcggtgctcaaggacgggttgctgcagcaggtcgcaccgcccagggagctttacgacgccccggtcaacgaattcgttgcgggcttcatcggctcgccgtccatgaacctcttccctgccaacgggcacaagatgggtgtgcgcccggagaagatgctggtcaatgagacccctgagggtttcacaagcattgatgctgtggtggatatcgtcgaggagcttggctccgaatcgtatgtttatgccacttgggagggccaccgcctggtggcccgttgggtggaaggccccgtgccagcccctggcacgcctgtgactttttcctatgatgcggcgcaggcgcatcatttcgatctggagtcgggcgagcgtatcgcttagtttcggacgtggggaggcgt

SEQ ID NO: 2694 - protein, 332 aa, Corynebacterium glutamicum
MATVTFDKVTIRYPGAERATVHELDLDIADGEFLVLVGPSGCGKSTTLRALAGLEGVESGVIKIDGKDVTGQEPADRDIAMVFQNYALYPHMTVAKNMGFALKLAKLPQAQIDAKVNEAAEILGLTEFLDRKPKDLSGGQRQRVAMGRALVRDPKVFLMDEPLSNLDAKLRVQTRAEVAALQRRLGTTTVYVTHDQVEAMTMGDRVAVLKDGLLQQVAPPRELYDAPVNEFVAGFIGSPSMNLFPANGHKMGVRPEKMLVNETPEGFTSIDAVVDIVEELGSESYVYATWEGHRLVARWVEGPVPAPGTPVTFSYDAAQAHHFDLESGERIA

SEQ ID NO: 2695 - DNA, 414 bp, Corynebacterium glutamicum
  CDS (101)..(391): RXA02358
tgaaggttggacgctgctttttgcaaatgacctcgagacctccgatattcccgctgcccttcgtccctagtacacccaaagtttatgaaagataaaaatcatggtttcttatagcgtgcacggcgcactagatatcgacggcagcctcaaaaaactcaccctcgatttcctcaataaactagccaccaatccagcttccccggggcttcatattgagcccatcaaaaacagcatcgactcccgcgtccgcacaggtcgggtcaatgatcaattccgcgcagtgctttttgagcttcacgacgaatttgatcatcactttgtagtgggtgggtttatccccatgatgatgccatcaccaaggcaggaaaaatccgccttgaagtcaactctgtaacggcattactcgactcatcg

SEQ ID NO: 2696 - protein, 97 aa, Corynebacterium glutamicum
MVSYSVHGALDIDGSLKKLTLDFLNKLATNPASPGLHIEPIKNSIDSRVRTGRVNDQFRAVLFELHDEFDHHFVVGGFIPMMMPSPRQEKSALKSTL

SEQ ID NO: 2697 - DNA, 3822 bp, Corynebacterium glutamicum
  CDS (101)..(3799): RXA02362
acaattgttcccattcgcatatctcgtgtccaccagagtcgctacagtaacgagaaacttaattatttgatccgattcttccgttcaaaggcctcattccgtgactatctctcgccgactcaaacaagagcgcagtttcgctgacgatcttcaagatctcaaaactctcaatgatcaactgcggtttacaaacgccaaattgcaagctcgcatcagtggtattggcaatgatggaaagaaaatcacgcgccctaccccactccttgcgctggattttcagctgaccgttgaagaatacgaaacgatcattgcaatcttggtggaagcagttggcggaaatcaatccaagccagcgattcttaaagatctgtttatagaatatccactcgtcttcctggcagcgctttctggaaccgccatgctcgatgctcaagaaggtttctggcctgcgttctggaaacgcactcaggtgtcagttccagagcatgtatacgacgcgatccgtaaagaactagttaatagcatccgcaaaaatggcctagaaactttttctctcgctgacctcaatcgacgcgaatatgtcggactcatccaacttcacagtggcctttctgcaaaagacatgctcgccttggtcaaatttatcgatcacactcgagcagaaaaccaaggatgggattctggtgaggactttgcatcatatgcgaagagtgtcttctcctccggggacaacctattaaccacggagtcgctcaagcaattagtcacccacatccctgcgcgttccgtcgacttcatcgccagagtctatgaactaaccaattggtaccgcgacctcaaagacctcaatgaagtagaagccttcgtaggtactcatgggctgccggaattgtctttcaaatttcttctggagtgtctgagcggcgaagctgaacaaattgccgaaaagacgaaagcagcaccagcaagcctggaaaacctggaacctccgcatctctatctggatccacagagttttgaactcagtcttgttttcccagcgatctctaaaactgcagcacttcagattccagcaccagaatggacagtgatttatgacggaaactccattaaagttcgtcccgaacaggactggtcctacggaggtttcgccgaataccgtttgcctttagacaaaccgctctccagcttgagagtcatcactccaacagagaaatccctaattctgattgaaggatttggccacaagaatcccattatgttctttaagaacaacggtcagccatatgcaaaccaagaaatgctcagtggcaacgctgtcacagctatagtcccagctgcagcaatcattcgtgcacgtatgcgagcttccaagactttcaactatcaagacttgggtcccttgtccggatggaacaagtgggtcattcgttcgatcccactcaaacgagctgaatcgatcacagtctcccacggtggcttcagaaaagaactcccagttcgacgcaaagttgatgttcaatggattactgaggatctcacgatcgagaatcttcaaggtctcgatcatgagcccgttttccacacgagtccccgcatcgaattccccacctctggatcaaactgggtaattcagtattcacagattcttccagatggcagcctcatcgaaatggaagattacccagtcgaacctgaaaacttcggatacgaactagacctcttcgaagaatccgacgacccttgggtcgggcaatttttagtaactctgctcaaggatgaaaaagtctatgaaacccgcaaattcaatctcgcggaaggcctcgatctttccctaacattcagcggaggcggacctgaaaatcgatttaggtaccccagcatcaatcagggacaaactggcttaacaaagactttcgcccgttttagttccaattctgaaaagcacatcaggttcccagatgagatcatcgggcttgatgcattcacctctcaaaaagcgtttaacatcgcaagcggtgatttccctgaggactacaacctcgacgttttcatcacgcctccgcaacttcactaccaagtacctgtcacacacagccaaacaaagtgggaaagcacaaagacgacactagatttcaatgactttgccgatggaaacctccagatcagattccctaatgaagtctatgatccaaacttgaaaatcattaaaatggtggcatacaagaaacctgagtccagtgagcctaaatacttaagcaaaattggttcaagcaaagtgtggtctatccctatggatcgcatcaaggaactcatggatgatgatgcccaattccttttgatcgcggagtggttcgctgaaagtaaagaccagcaccgagagaagatcattagcgaagctaagcgaactggaaaaatctccaatgcagcgcttaagagtgctcgtcctcaacctcaagcaagttcccacattgcaacaattgagaaaaagcccctactagctgcggctgaaattaagctttctaccgtggagttggaacttggtcggcacacttctaagagactggaaggctgggcatggtctgcgctcaacccgcttgatccaccaatcaaagtcgatttccaaggaacctcaggctcacttccagacacccacttcgtcgttggccctttaatcgtggaagtgagagaaaaagagtttctctcccaatggcagccaaaagttccctcagttaaagccgtggttgcaaatgatccctcatttgaattggaccctcaatttgatcctttcctcacacaccgatggatgttcgctccacgaagtgggaaggtcttactcccacaagaaatccgcacagtgtgggacgcccgattcaatatgcgccatgtcttagcgcagcgtgaaaaccttcatgtgaaatcgattcaagattttgacgatgccaccagtacctatctcaccagtgatcctcgggtggcattagatgaattggataagagctcaattccgtctaattcccactttgaatcattcatccgatccggattagctgagctttctttcgaagttgacgacacagccggagatatccatcgcgttccctggatcggcctgatccaggaaatgaacgacctcagaattctgcagatacaaggctatgaaacagaagaacgagccatcgaacgccgaaattcgcagagctacatccgtgagataggaggcagtgaattgtggaatatcctaaaaggaaattcagagggattgtctcttgctcaaaaatgcgcaccacaagccactgagattaatgtgattcgtaattcaggcttggaagctatgcgcaatgggctgggcgccgatcagttcagcgccgagtttatttcagcagactcacgcctacgagctcagcttgaatggttggaaaaccgccgagagctcaatgatctcggccagctcccaacgctcttcgatttcgccgagaaatacgagtacctcatcgatcacttaggtgatgatcgcatcaaggtcactgcacgtgagctgtctactcttgcgtcggaacaccgtcgcggcaacgctgaaaactggctttatgcaccatatgtgtcattcatttacagcttgcttaaccgaatgatcgctcatgaagtaatacgtccgatcgctcagatcaattactcacggcacgattgggcaaacgctgctcggctgattcctcgtctcacaggatttgacctggtgagtgccgaagcgaaagtgctcagcgcaataaacaacaacaatataatcccaactgcaatttaaggatcactatgtccaacgca

SEQ ID NO: 2698 - protein, 1233 aa, Corynebacterium glutamicum
VTISRRLKQERSFADDLQDLKTLNDQLRFTNAKLQARISGIGNDGKKITRPTPLLALDFQLTVEEYETIIAILVEAVGGNQSKPAILKDLFIEYPLVFLAALSGTAMLDAQEGFWPAFWKRTQVSVPEHVYDAIRKELVNSIRKNGLETFSLADLNRREYVGLIQLHSGLSAKDMLALVKFIDHTRAENQGWDSGEDFASYAKSVFSSGDNLLTTESLKQLVTHIPARSVDFIARVYELTNWYRDLKDLNEVEAFVGTHGLPELSFKFLLECLSGEAEQIAEKTKAAPASLENLEPPHLYLDPQSFELSLVFPAISKTAALQIPAPEWTVIYDGNSIKVRPEQDWSYGGFAEYRLPLDKPLSSLRVITPTEKSLILIEGFGHKNPIMFFKNNGQPYANQEMLSGNAVTAIVPAAAIIRARMRASKTFNYQDLGPLSGWNKWVIRSIPLKRAESITVSHGGFRKELPVRRKVDVQWITEDLTIENLQGLDHEPVFHTSPRIEFPTSGSNWVIQYSQILPDGSLIEMEDYPVEPENFGYELDLFEESDDPWVGQFLVTLLKDEKVYETRKFNLAEGLDLSLTFSGGGPENRFRYPSINQGQTGLTKTFARFSSNSEKHIRFPDEIIGLDAFTSQKAFNIASGDFPEDYNLDVFITPPQLHYQVPVTHSQTKWESTKTTLDFNDFADGNLQIRFPNEVYDPNLKIIKMVAYKKPESSEPKYLSKIGSSKVWSIPMDRIKELMDDDAQFLLIAEWFAESKDQHREKIISEAKRTGKISNAALKSARPQPQASSHIATIEKKPLLAAAEIKLSTVELELGRHTSKRLEGWAWSALNPLDPPIKVDFQGTSGSLPDTHFVVGPLIVEVREKEFLSQWQPKVPSVKAVVANDPSFELDPQFDPFLTHRWMFAPRSGKVLLPQEIRTVWDARFNMRHVLAQRENLHVKSIQDFDDATSTYLTSDPRVALDELDKSSIPSNSHFESFIRSGLAELSFEVDDTAGDIHRVPWIGLIQEMNDLRILQIQGYETEERAIERRNSQSYIREIGGSELWNILKGNSEGLSLAQKCAPQATEINVIRNSGLEAMRNGLGADQFSAEFISADSRLRAQLEWLENRRELNDLGQLPTLFDFAEKYEYLIDHLGDDRIKVTARELSTLASEHRRGNAENWLYAPYVSFIYSLLNRMIAHEVIRPIAQINYSRHDWANAARLIPRLTGFDLVSAEAKVLSAINNNNIIPTAI

SEQ ID NO: 2699 - DNA, 744 bp, Corynebacterium glutamicum
  CDS (101)..(721): RXA02374
acccacaacagacatattttctccttgatgcgcaccaaaatgcgccttaggttgagatgaattggatagcccaccgtacgcctatctacactgaattaccatgagctatgactttgtcctctttgaaaccgatggcgacccaggtagcgcccgtatttccaaaaccccactgaccgaacgcatcgatttcgccacgccatctacaacccctgtgttggaatctctttcggcagggcttgccgaaacggtgccagacaccgtcaagcttgaagaagacgccatccacttatccggtgatcgttgcctttacgttgtgaccaactacaactccgccgaagaagcagccgaatggctcaccgccatcgctttcgattacggactgggccttgccgacatgaacgcggacaccatcctgcttttcggcgatgaagattccgacgctgtcgtccaaatcgatgactggttctcccccgctttctctgcgtacggccttccccacctcctggtggaagtcatgcgcctgaaggattccaaaaccccttatcttcgagtcacacttgctgcagatgactcgaaatttatccaaaccctttacgaaaccgacaacaaacaatggttggtggaaacctcttcctccacaggcacggacgaaacccacgtgaagaccattaatgatgtgctggaacgcatcgagacatggttcaaccaggagactgctgtctaaaccttttgtcgtgttctggg

SEQ ID NO: 2700 - protein, 207 aa, Corynebacterium glutamicum
MSYDFVLFETDGDPGSARISKTPLTERIDFATPSTTPVLESLSAGLAETVPDTVKLEEDAIHLSGDRCLYVVTNYNSAEEAAEWLTAIAFDYGLGLADMNADTILLFGDEDSDAVVQIDDWFSPAFSAYGLPHLLVEVMRLKDSKTPYLRVTLAADDSKFIQTLYETDNKQWLVETSSSTGTDETHVKTINDVLERIETWFNQETAV

SEQ ID NO: 2701 - DNA, 792 bp, Corynebacterium glutamicum
  CDS (101)..(769): RXA02390
gctggtggtgctgacccatacgctggaactccaactgctgttgataccgccaagatgtttggccgcgaggatctcgtagctcgcttcgagtcataggccggtggagtggaccgcttttggcaccctgattctgctcaatttggtgggcagtttatccccggggcctgatacctttttcctcctccgcttagccacccgctccagagcgcacgcgatcgctggcgtcgccggcatcgtcaccggactcacggtgtgggtgacgctgacggtcgtgggagcagcggcgctgctcaccacttatccgtcgattctcggaatcatccagctcgtcggcggcacgtacctaagcttcattgggtacaagttgctgcgctcggcgtcgagagagcttatcgacgcccgccagttccgtttcaacgccgatgcccgacctatcccggatgcggtagaagcactgggaacccgcactcaggtatatcgacaaggtttggccaccaacctgtcaaaccctaaagttgtcatgtacttcgcggcaattctggctccgttgatgccagcgcacccatcaccggtgctggcgttctctatcatcgtggcgattttagtgcagacctttgttaccttctctgctgtgtgcctcattgtctctacggagcgtgtgcgcaaagcaatgctgcgtgcaggtccctggtttgacctgcttgctggcgttgtcttcctcgttgtgggtgtgactctgctgtatgaaggcctgaccggtttactcgggtaaaggcataaaaaatggcttcc

SEQ ID NO: 2702 - protein, 223 aa, Corynebacterium glutamicum
VEWTAFGTLILLNLVGSLSPGPDTFFLLRLATRSRAHAIAGVAGIVTGLTVWVTLTVVGAAALLTTYPSILGIIQLVGGTYLSFIGYKLLRSASRELIDARQFRFNADARPIPDAVEALGTRTQVYRQGLATNLSNPKVVMYFAAILAPLMPAHPSPVLAFSIIVAILVQTFVTFSAVCLIVSTERVRKAMLRAGPWFDLLAGVVFLVVGVTLLYEGLTGLLG

SEQ ID NO: 2703 - DNA, 405 bp, Corynebacterium glutamicum
  CDS (101)..(382): RXA02393
  modified_base (17): a, t, c, or g
  modified_base (20): a, t, c, or g
  modified_base (24): a, t, c, or g
  modified_base (26): a, t, c, or g
  modified_base (39): a, t, c, or g
  modified_base (41): a, t, c, or g
  modified_base (58): a, t, c, or g
  modified_base (67)..(68): a, t, c, or g
  modified_base (82): a, t, c, or g
  modified_base (85): a, t, c, or g
gccaccttcatttttcncangccncngcaaatcagaacncnaccttctggcactcccngctcaaatnngggacgtccatgcngangttttagacatcttcatggcggaatctttagtgattatcaacatcgacgagaaaagcgccaagctgcttatcgacgccgcccgccaccacatccccacccgcttcaccgggcccaacgcccggccgctcagcgtcatccccatcgaggatccccgctcacgcccgacgctccacccagatcatggttggatgatgccgctaagcccaccagtggtggatgaactgcttggcggtggcttgaaaattggagaaacagaactagaaagcaccaacattgcgttcattgttgatgcttcctaaaaatcctgtgccgtgaggtt

SEQ ID NO: 2704 - protein, 94 aa, Corynebacterium glutamicum
MAESLVIINIDEKSAKLLIDAARHHIPTRFTGPNARPLSVIPIEDPRSRPTLHPDHGWMMPLSPPVVDELLGGGLKIGETELESTNIAFIVDAS

SEQ ID NO: 2705 - DNA, 755 bp, Corynebacterium glutamicum
  CDS (1)..(732): RXA02395
ctcatcaccatggctatcccctccttcattttgatcctggcgttcaccattttcggtggaactgccatcacgatgaaccgcgagaacgtagatggttttgacggcagttcatccaaggaacaggtgctgtttgatatgttcagcaaccttccgctgtactcgatcacaccgttcattttgatctttgtgctggcagtattctttgttacctctgccgattccgcctccgtggtgatgggaacgatgagctcccaaggtaaccctgcaccaaacaaattaatcgtggtgttctggggactgtgcatgatgggcatcgcggtggtcatgctgcttactggtggcgaatccgcgctgactggtctgcagaacctcaccattttgatcgccattccgtttgcgctggtgttgatcgtgatggctattgcctttattaaggacttatccacagacccagccgctattcgacaacgctatgcaaaggcagccatctctaacgcggtggttcgtggcttggaagaacacggcgacgacttcgagctctccatcgaacctgcagaggaaggtcgtggagcgggtgctaccttcgattccaccgctgatcacatcaccgactggtatcagcgcaccgacgaagaaggcaatgatgttgattatgacttcaccaccggcaaatgggccgatggttggacaccggaatcgaccgaagaaggcgaagtggacgcgaaaaaggattaaaaaataacgactggctggga

SEQ ID NO: 2706 - protein, 244 aa, Corynebacterium glutamicum
LITMAIPSFILILAFTIFGGTAITMNRENVDGFDGSSSKEQVLFDMFSNLPLYSITPFILIFVLAVFFVTSADSASVVMGTMSSQGNPAPNKLIVVFWGLCMMGIAVVMLLTGGESALTGLQNLTILIAIPFALVLIVMAIAFIKDLSTDPAAIRQRYAKAAISNAVVRGLEEHGDDFELSIEPAEEGRGAGATFDSTADHITDWYQRTDEEGNDVDYDFTTGKWADGWTPESTEEGEVDAKKD

SEQ ID NO: 2707 - DNA, 402 bp, Corynebacterium glutamicum
  CDS (101)..(379): RXA02396
gagtgcttgtaggttgatagaaagtaaactaaagtaaacatcaggttaacagccgggggttcaagtattaactccctcggaaacagaaaggaacacgacaatggctaccacagcttccaagatctccacgatccgtccagcacagcaagatgctctttggagcgtacgtgaggatcttcacgctcgcttcgatggcctggtcgatcctgtccaggtagacgcaattttggaccatgtcgcatctaaccgcgaagccaagatcaccgtcttcagcaagattttcatcgctcgcgaggcaaccgctgcacttcagcagattgctggcaacgttaacgcagacctgcttgacttcattgccctcaaccgtggcatggcagcataagttttagctgcccataaatt

SEQ ID NO: 2708 - protein, 93 aa, Corynebacterium glutamicum
MATTASKISTIRPAQQDALWSVREDLHARFDGLVDPVQVDAILDHVASNREAKITVFSKIFIAREATAALQQIAGNVNADLLDFIALNRGMAA

SEQ ID NO: 2709 - DNA, 888 bp, Corynebacterium glutamicum
  CDS (101)..(865): RXA02403
gcacagaattaaatcgctggtgtgcgaactttcataccttaacgcagtagtgatgcttaaggcacaacgtgggggcaattccggcctatactttggaagtatgactacttttattacctccggtggcttggaaatctcccccgctggcgctcatattgttcacgccgaatcacctgaaggtgagctgttgtttgttagctccgcttcccaatatggggagggaaatgcaattaggggtggtgtgcccatcattgctccatggtttggtggactgcttggtttggaccctgcacatggttgggcgaagcgttccgcgtgggacgtgactgaacatgacggccaaattcacgctgaatatggccgcgatggtttactgctggatattcgtgcgaacagcactaagaatggttttgagatcaccctgcgcgcttacaacgacaccgatgaggcacgcactgtgcagttggccttccacccttatttcaaggtggatgatgtagaaaagatcgaggtccgtggccttgatggggtggacattctcaatcgcctgaacaatgaggtggagacccaagatggtcccgttacttttgatggcgagttcgatcgcattgcgctagggactccggttgtgaggatttttgataccgatcgcatcatcaccattgagggcgatggtcatgattccactgtggtgtggaatccaggcgaaagtcgcgcctccaccgtggccgatattggcgaaggtgaatggcgcgactttgtgtgtgttgaaccggcgcttttgggtgctgaccaaaaaggagtgagggtggctccggggcagtcagtcaccgttgggatgcaggtaagcgtcgaaaagcgtgcttagttttttgctttgaactcgcg

SEQ ID NO: 2710 - protein, 255 aa, Corynebacterium glutamicum
MTTFITSGGLEISPAGAHIVHAESPEGELLFVSSASQYGEGNAIRGGVPIIAPWFGGLLGLDPAHGWAKRSAWDVTEHDGQIHAEYGRDGLLLDIRANSTKNGFEITLRAYNDTDEARTVQLAFHPYFKVDDVEKIEVRGLDGVDILNRLNNEVETQDGPVTFDGEFDRIALGTPVVRIFDTDRIITIEGDGHDSTVVWNPGESRASTVADIGEGEWRDFVCVEPALLGADQKGVRVAPGQSVTVGMQVSVEKRA

SEQ ID NO: 2711 - DNA, 603 bp, Corynebacterium glutamicum
  CDS (101)..(580): RXA02412
tgcggtgcgagcaacttcggagactattggctctcctacagctgtggcatccgcgaaacgttcacccaaaggcagtctcattgggttgatcttgatcttggtggccatcatcgtgattgcgtttgtcttgttgttcaacagcctcgttgcaccaaataattcctcgagccctgtggcaagtccaagcacctctgaatctgtggagcaaactatttcggaatcccctgagtcaccgagcgcgacagaggatcagcccccaagcagtgcaacggaaactccccgaaaccgccctgcgcaaccatcacttcctgcgggagcatcaccagccaatgatgctgctgccacccagaccgatgccggcaatttaaacaatgtgtacaccgggtcagcgtccacctcagcaggttttgctcaagccgtccgagatgcttttgtaaaccactatttagacaccaatgaactatccggcagggtgacagccaccagccctgtcactggcggaaactacaccatgaactgcgaagacaacggcgagtacgtcacctgcacaggtggcaacaacgccgttgtctacatttcttaaaacttctaactacacccggg

SEQ ID NO: 2712 - protein, 160 aa, Corynebacterium glutamicum
VAIIVIAFVLLFNSLVAPNNSSSPVASPSTSESVEQTISESPESPSATEDQPPSSATETPRNRPAQPSLPAGASPANDAAATQTDAGNLNNVYTGSASTSAGFAQAVRDAFVNHYLDTNELSGRVTATSPVTGGNYTMNCEDNGEYVTCTGGNNAVVYIS

SEQ ID NO: 2713 - DNA, 2247 bp, Corynebacterium glutamicum
  CDS (101)..(2224): RXA02417
cgctgttcagaggacttccgcgggggtcgacagtataacgaattagcgtcactagaataatcgggctgtttagttcttcacaccaacataatcttatgtaatggacatgaactcttctgaccgattggctctacgcaccgcgttagagaaattgtcggcatcggctaccgccatggcgtcagcgagcaatgacatcaaagatctcgttgcacgccttgatgcccaagagatgtcgcttatcgacgcaaacccggctcccaccccagcgcccactgccccacccgaggctcagcttgagccccaaccactggtgtatgcaaccgcctcaacggcgcctgcactggcggatgtttccgggaccaaccgtattccacgtttcgttcggcatcgcgccctggatccagcgagcgaaggctggccacttggcgtcgagaagcaaaaagtgcaggctcctgcgtacccgcaccccgtccggccagctcgtccggcaaagccgccgatgacgtcggaggaaaagatcatgcgtggcgtggcgatcggcggtggtgtgatcaccgtggccggcgtgattttgctggtgtcggtggcgattcaacgcggttggcttggtccgctgggtcgtgtgattggtgcgtacctgctggcggtgctgcttcttggcgccgcacattatgtgcgcaagcgcggaacccgtgtggaagcactcgttgcgttgacggttacctcccagattgcgtttcttgccacaacgagtgcaatcatcttcattttggaatggtggccgcctggattgggctcgctggtggcattaataggcaatattgggttcttaatcgttggtcgattgtggagcctatccaaaaccgagaagtccgcggccgaaggccacacagtatttgtgggagccatcgccgtttcaggattctccgcgatactcttcgcgctctccgccgatgcctggtggccaattttctccattgttgcggcattgttgctgtcgtaccgcatctccacgaatatcatccgagcgagcatggcggcattcgcggtcattctgcagtttgttttgtcggcatcctggcaaaccatggaatggccagcaacaatcgtcggcacaattactgcagtcctactcgtagccttgacattgtgggatccgtttaagatcaccgccaccgacagccacgacatcgcgttggaggaatactggcgcagctttgaaaccaaccctgtttccacgtgggtgggtgctgtttctccggtgctcatcgtgttcatcaccaccagcatgttcattgcagtcgactggccatggcttgccctgataccagcgtgtgcggtggcagctctcggaattttcgcgctgcgctcatcagacaccgcgtccattgaaaatcaacgcatgtctcgcctcattgctgttgttggccttgcgttgattgctgaaacttttgtccagctgttctacggcgatctccccaccaacccgcttctcgtcatggtgttcctcatcgccggagctgcactatttatgtggttgcggatgcttccaccgcagcgtcaattaggtgtcgtcccatgggtcgcttggctgattgccgccgtggcgatgaccggcgtgctactgcgcaatgtcgtttcaatttctccactgtggctcaccgatacccaagcgctcatccaagcattgctgatcttggtgttcattgccgccacaatccaagtccgccgcagcttctacggacacaaactgtggctgcaaattttggtcggcttgacgcttctcacgctgtccgcaatttccatcgtgaccatcacaaccttcatcggtcgcctcatcgcaggaaatgccggcatgatgctcggattcctcatcggccacgccacggtttctatcctgtggatggtcatcgccgcagcactgatgcttaataggaagcttctcgacgcgcccggcgccctttggaccggcgttggcttggcggttgcgggcaccttcaagctggtgttctttgacctggtcgcgctgtccggagttccccgcgcaattgccttcctgctctccggtatcgcactgctgacaatcgctgctatgaggggccggagaacctcagaaaacaaggccgacgtagctagacctcaggtggctagacatggggcgactagccataaaaatgaggagccttcccatgaaagcccctcatcttctcctacaacaactctttaaggaattggccggtgtaggaa

SEQ ID NO: 2714 - protein, 708 aa, Corynebacterium glutamicum
MDMNSSDRLALRTALEKLSASATAMASASNDIKDLVARLDAQEMSLIDANPAPTPAPTAPPEAQLEPQPLVYATASTAPALADVSGTNRIPRFVRHRALDPASEGWPLGVEKQKVQAPAYPHPVRPARPAKPPMTSEEKIMRGVAIGGGVITVAGVILLVSVAIQRGWLGPLGRVIGAYLLAVLLLGAAHYVRKRGTRVEALVALTVTSQIAFLATTSAIIFILEWWPPGLGSLVALIGNIGFLIVGRLWSLSKTEKSAAEGHTVFVGAIAVSGFSAILFALSADAWWPIFSIVAALLLSYRISTNIIRASMAAFAVILQFVLSASWQTMEWPATIVGTITAVLLVALTLWDPFKITATDSHDIALEEYWRSFETNPVSTWVGAVSPVLIVFITTSMFIAVDWPWLALIPACAVAALGIFALRSSDTASIENQRMSRLIAVVGLALIAETFVQLFYGDLPTNPLLVMVFLIAGAALFMWLRMLPPQRQLGVVPWVAWLIAAVAMTGVLLRNVVSISPLWLTDTQALIQALLILVFIAATIQVRRSFYGHKLWLQILVGLTLLTLSAISIVTITTFIGRLIAGNAGMMLGFLIGHATVSILWMVIAAALMLNRKLLDAPGALWTGVGLAVAGTFKLVFFDLVALSGVPRAIAFLLSGIALLTIAAMRGRRTSENKADVARPQVARHGATSHKNEEPSHESPSSSPTTTL

SEQ ID NO: 2715 - DNA, 933 bp, Corynebacterium glutamicum
  CDS (101)..(910): RXA02421
cggtgtactttagcaacaaggaaaaataactatctacggcctgttaatagttcaacctacaggccaaacccgccttcattaatgaattgtgagatcgaccatgacattgctcttgaagccaattttgcaggctgcgggaatcaatcctgaagatgcgttagcaatgcgtcatgtatttatttcgatccacgaggacaccaattccaatggtattacccgtgaatctaaagacgaagagattctcgcctacacagctagccagtcaagtgatccgcgtagattcccactgaatccgccacgcttttggatggtgttcatccgagaaggtggctcgcaggctcgactatggaaagtggtggaaaaccacggcgaagtcaccaatgatggcgtacgcagagtcttcaaccttactgagattgaactcatggatgaccttgcaggcagactcgttattcgttggaattcaccacgcaagtggtggattaagggcactactgctgccctatacaccgtggatactattgccgatgcggagcctattccgtttccaggtttcgacaatcttgtcctgagctacccatttcttcaagaagtgatgcgtgaacctgcctatgcttcgtggcgcacagctcttggtgctgtcaaaggtatttacctcattaccgatacccgtactggccgccactatgtcggcaaagctgaaggactagaaaacatacgccaacgctggaacagctacgccaccaatggacatggcggaaacgtaaaactcaaacagcttaagcccgacacatttcgtttttcgttgcttcgggtctttgatcccgcaactccaactagcattattaacgctgctgaaagccactttaaaattgctctcgacacgatcaagcacggattaaacgcaaactaatcgcagctccccaaccccaa

SEQ ID NO: 2716 - protein, 270 aa, Corynebacterium glutamicum
MTLLLKPILQAAGINPEDALAMRHVFISIHEDTNSNGITRESKDEEILAYTASQSSDPRRFPLNPPRFWMVFIREGGSQARLWKVVENHGEVTNDGVRRVFNLTEIELMDDLAGRLVIRWNSPRKWWIKGTTAALYTVDTIADAEPIPFPGFDNLVLSYPFLQEVMREPAYASWRTALGAVKGIYLITDTRTGRHYVGKAEGLENIRQRWNSYATNGHGGNVKLKQLKPDTFRFSLLRVFDPATPTSIINAAESHFKIALDTIKHGLNAN

SEQ ID NO: 2717 - DNA, 653 bp, Corynebacterium glutamicum
  CDS (1)..(630): RXA02425
cccggcgcctttgatgaattaaccagtgtttggggagaaaaaggcggaagttgggccgctgttatcggcttcttcggtggcatcgcgctgatcgccatcatcgaccgcttagtccccacggcgattaacccccacgagccctccaccgtgggaggcgccgttgaaggattcgagcgccgcaaccgcatgatgaaaatgggtgtgctcactgcgctggccatcgcgatccacaactttcccgaaggtttcgctacattcttggccggattgtccgatccaatgatcgcgatccctgtggccgtggcaattgccattcacaatattccagagggcattgcggtgccggtgccactgagggaagctacagggtcacgtcgaaaagcattaggttgggcgaccctctccggccttgctgagcccgccggcgccctcatcggattcctgctgctcatgccctttatcggaccagaagcactcggcctgtgcttcgccgcagttgccggcgtgatggtgttcatcagcgtcgatgaactactgcccactgccatctccagcggcaaacaccacaccgccatctacggactcatcgctggcatggcagtcatggcgatcagcctgctgctgtttatctagcgttcagccgcaacaagcat

SEQ ID NO: 2718 - protein, 210 aa, Corynebacterium glutamicum
PGAFDELTSVWGEKGGSWAAVIGFFGGIALIAIIDRLVPTAINPHEPSTVGGAVEGFERRNRMMKMGVLTALAIAIHNFPEGFATFLAGLSDPMIAIPVAVAIAIHNIPEGIAVPVPLREATGSRRKALGWATLSGLAEPAGALIGFLLLMPFIGPEALGLCFAAVAGVMVFISVDELLPTAISSGKHHTAIYGLIAGMAVMAISLLLFI

SEQ ID NO: 2719 - DNA, 510 bp, Corynebacterium glutamicum
  CDS (101)..(487): RXA02427
agcgatgctgacagtgcttcacttcgggccgcatctaattcctgctcgattacccaactgctcgcgcagggaatcgtcatcgacgacgaggtgaactagcgtggattttgagttgggtaaacgctgcccctgcggaactggccttacctacggtgagtgctgctaccgctttcactccggcgaatgggtggcccccaccgctgaagcgctcatgcgatctcggttcaccgcctttgctgttggaaattcccagtaccttcttgacacttgggatccagaaacccggccaagcgaactcggcctcgatatgggaattgatttctaccgcctcgacatcctcgagaccaccggcggtggacccttcgattccaccggcaccgtaaaattccaagccttctacaaggggctcgcctccggcgtccaagaagaagactccacattccgcaaggtcaacggcgcgtgggtctattccacaggagatgtcgactagtttccccacacgtgcaatag

SEQ ID NO: 2720 - protein, 129 aa, Corynebacterium glutamicum
VDFELGKRCPCGTGLTYGECCYRFHSGEWVAPTAEALMRSRFTAFAVGNSQYLLDTWDPETRPSELGLDMGIDFYRLDILETTGGGPFDSTGTVKFQAFYKGLASGVQEEDSTFRKVNGAWVYSTGDVD

SEQ ID NO: 2721 - DNA, 309 bp, Corynebacterium glutamicum
  CDS (101)..(286): RXA02430
cttgtagtcaagcgtggaccaaatgcaggcgctcgattccttctggaccagccaaccacgaccgctggtcgtcacccagaaagtgacatcttccttgatgatgtcacccgtttcacgtcgccacgcagagttccgcatcaatgaaggtgaatttgaagtcgtggacgtagggtccctcaacggaacctacgttaaccgcgagccacgcaacgctcaggtcatgcagaccggtgatgagatccagattggcaagttccgcctggttttcctcgcaggccctgctgagtaaaaacacttcctaggaaagtt

SEQ ID NO: 2722 - protein, 62 aa, Corynebacterium glutamicum
MSPVSRRHAEFRINEGEFEVVDVGSLNGTYVNREPRNAQVMQTGDEIQIGKFRLVFLAGPAE

SEQ ID NO: 2723 - DNA, 723 bp, Corynebacterium glutamicum
  CDS (101)..(700): RXA02433
aggcacgagatcatccatcgtcggttccatagaatgggtagctgtcgaatgctgatagatatttggtgaccagagattagagcaaaggatcattttcatcgtgaagcttttcaaggcaaccgcagttacttttactgttgcagcagcattggcgctcagcgcgtgctccagcagtgatgattcctcttcggagtcaagcacctcttcttccacctcttcggctgcgtctgatgctgcgactcagtacccaactgctgaggaactgaatgcaattttggctgtggcaaccgaccctgaggcaccaatcgaggagaaggtgaagactgttcagggttctgagaacgctcctgagctgtttgagaccatgactcaggcaaaggtggagtcgggtgctgagttccaggttgttggttctgtgcttcctggctatgacccaacctctgaggttctgaccaccgtcatgttccagcttccggaccgcgctgagcaggaagctgaaggcgtggagtttgtgaacactgatggtaattggcagctgtcccaggattgggcttgtatcttgatcaccaatactgttgctcctgagcaggttcctgcaatgtgtgttggaactgatgcttcttccgctggtattgaagaggccccagctgaagagggtgctgttgttgaggaagcccctgttgaagaggttcctgttcagtagggtttaacggctcaggctga

SEQ ID NO: 2724 - protein, 200 aa, Corynebacterium glutamicum
VKLFKATAVTFTVAAALALSACSSSDDSSSESSTSSSTSSAASDAATQYPTAEELNAILAVATDPEAPIEEKVKTVQGSENAPELFETMTQAKVESGAEFQVVGSVLPGYDPTSEVLTTVMFQLPDRAEQEAEGVEFVNTDGNWQLSQDWACILITNTVAPEQVPAMCVGTDASSAGIEEAPAEEGAVVEEAPVEEVPVQ

SEQ ID NO: 2725 - DNA, 933 bp, Corynebacterium glutamicum
  CDS (101)..(910): RXA02437
gcccatcataactacatcgagcgaaatgccaaccacatgtcccatgcttttactaatgtggggtcttagaagaacgcgaccaatttaaggagagttgaatatgagcacgattggcaacctcaagttagtagtggatggcgcacgtaaagcttatggaacttatgcggattaccgcgaccgcaaggtgtctgagacttatgatgcgttgtcccaagctgctggtgaatatgcaccaaaagctgagcaggctgtagagactgcgcgggaatcagcgaaggaattttatactgagtcgcgcgataaggctggaaatgtcaccaaggctgctcgtgctcgtctggaaaaggcgctcgctgaggctgacaagcagggcacttctgcgttgaaggacgcacgtgaatcgggcaagaaattgaaccggaaggcgcgtcgaaaagcagacaaggccgctaaggcagcccgcaaggcgactgaaaagaaggagtcgcactgggtgcgcaatctgtcgttggcggcgctagcgacctccggcatcgtcgcggtggcctacgcgtttttgaacaagaccaagaaggaaaccccaggcacccagcctccacgggttgaggttcagttgaagaaggccgtggagcaggatgagcctgaggttgtggctgaggctgctgtggaggagccagagttggtgtactccacagaaagcccagaaaccactgaagccccagctgaggccaccgaaactccagcagaaaccaccgaagaagaagccaaaaccgaagctgaactagaggcagagctcgaggctgaggccgatgcggagcaggaagcggcagaagaggcggaagctgaggccattcaggctgagtttgataagaagaatgcacctcagcgcacccagagcgaaaagaagaagtaggttaacgcttcaattcgtgg

SEQ ID NO: 2726 - protein, 270 aa, Corynebacterium glutamicum
MSTIGNLKLVVDGARKAYGTYADYRDRKVSETYDALSQAAGEYAPKAEQAVETARESAKEFYTESRDKAGNVTKAARARLEKALAEADKQGTSALKDARESGKKLNRKARRKADKAAKAARKATEKKESHWVRNLSLAALATSGIVAVAYAFLNKTKKETPGTQPPRVEVQLKKAVEQDEPEVVAEAAVEEPELVYSTESPETTEAPAEATETPAETTEEEAKTEAELEAELEAEADAEQEAAEEAEAEAIQAEFDKKNAPQRTQSEKKK

SEQ ID NO: 2727 - DNA, 1077 bp, Corynebacterium glutamicum
  CDS (101)..(1054): RXA02443
caagcactgccgcgggagccactatcactttgttaagtgctgcgatattttttgccaccttattgacaaagagtgccattagtaggttaaacttcaccgcgtgatactgaaagacattttcaataatggggagctctttggggcttcctccgcgaaaaatttccgaaaactactagctgttccagccgttgccgcctcactagcttttggtatcaccgcctgttccgctgtagatgacacccctgacattgtggtcaccaccaacatcctgggtgatgttgtaagccatatcgtgggagattccgcagatgtccaagtactcatgaaacccaacgcagatccacattccttcggagtctcagcacaagacgccgctgccatggaacatgccgatctcatcgtggccaatggactaggacttgaagagggccttcaatccaatgtggacaatgccaaaagccaaggggttcccgtcttggaagtcggcgaacacatcgatgtcattgactactcccccggcgttccagatcctcacttttggacagacccggcgcgcatgatcgccgccacggaagttatagaagctgaactgatcaaagaactcgatccttccctgactgaatcgatcacacaatcagcccagcactaccgtgaggaacttgttgcccttgatgaggaagtcaccgaattgctcagcggcgtggccccagaaaaccgcaagctggtaaccaatcacaatgtttttggatacctggccagccggtttaactacaccgtcattgacaccatcatcccaggtggaagcacattggcggcgccttcagcatctgacctcaatgacatctccaccgccatcgaagacaacaatgttcccgcaatcttcaccgatacctcaagcccacaacggttagctgaagtgttggccagcaacgctggcattgatgttcaagtggtgtccattttcacggaatcactcaccgatgcagatggtgaagcacccacctacatcagcatgcaaaaaatcaatgccgagcgcattgcaagcactttgtcctaaacagtcctaaacagtcttaa

SEQ ID NO: 2728 - protein, 318 aa, Corynebacterium glutamicum
VILKDIFNNGELFGASSAKNFRKLLAVPAVAASLAFGITACSAVDDTPDIVVTTNILGDVVSHIVGDSADVQVLMKPNADPHSFGVSAQDAAAMEHADLIVANGLGLEEGLQSNVDNAKSQGVPVLEVGEHIDVIDYSPGVPDPHFWTDPARMIAATEVIEAELIKELDPSLTESITQSAQHYREELVALDEEVTELLSGVAPENRKLVTNHNVFGYLASRFNYTVIDTIIPGGSTLAAPSASDLNDISTAIEDNNVPAIFTDTSSPQRLAEVLASNAGIDVQVVSIFTESLTDADGEAPTYISMQKINAERIASTLS

SEQ ID NO: 2729 - DNA, 1401 bp, Corynebacterium glutamicum
  CDS (101)..(1378): RXA02444
aaaatcaatgccgagcgcattgcaagcactttgtcctaaacagtcctaaacagtcttaaacagtccccgttttactaaatgttttactaaaaggagaaccatgaaaaactccaagctacttcttattgctgcggtatccaccgcatctatcctgctggcaagctgtggcactgacagctctgcagatactgcaactgcgtctagctctgcaacagcaagctccgaggcacacgatcatgatggccacgaagccgaaggcagcagcactgccgttgaggtgtcctccccgcaggcccgcatcgtcaccacctacgacggtggcatcattaccctcgacgccaacactctggaaatcctggaagacaccgaactagcaggttttaaccgcctcaacagtgcaggagacggacgccacgtatttgtctccacaggtggcggcttccagctctttgataccggcgcatggaccgaaccacacggcgatcacacccacagctacaccgccaccccagaactcaccgacatcacctactccaccgataagcctggtcatgtagtgaaccacgccggcaagaccgtgctgttcggcgatggtgacggcaaaatccagatcttcgacaccgcttccctcctcaagggcgatgaagtagaacctgagatcaaaaacgccctcaaagcccaccacggcgtggcagtagtcctcgaaaacggcgacctgctgcacactttgggcgatgaggattcccgcaacggcgccgtcgtattcaacgcagccggtgaagaaatcgcccgcaacgaacagtgccccggcgttcacggtgaaagcgcagcactcggtgacgccatcgcagttggctgtgaagacggtgtactgatctacaaggacggcgagttcaccaaggtccaggcacctgattcctacggtcgcatcggcaaccaatcaggcagcgacgtctctcctgtcgtcctcggcgattacaaggtagataaagacgccgacttggagcgcccagagcgcgtttccctcaccaacaccgagaccggcgagctcaccctcgttgacctcggcacctcctactccttccgctcacttggccgtggccctgcaggcgaagcagtagttctaggcaccgacggcgcactccacatcatcgatgccaacaccggcgccatcaccaacacctaccccgtcatcgatgcctggaccgaaccagaagtatggcaagaagcacgcccaaccctgttcatcaacaaggaccgcgcatacgtctccgacccatcaaacaacgaactccatgttgttgacctggccaacggcaacatccttgccagcgccaccctgccaggaacccccaacgagctcaccggagtgagcggctaaaaagaaattgcttttcgacg

SEQ ID NO: 2730 - protein, 426 aa, Corynebacterium glutamicum
MKNSKLLLIAAVSTASILLASCGTDSSADTATASSSATASSEAHDHDGHEAEGSSTAVEVSSPQARIVTTYDGGIITLDANTLEILEDTELAGFNRLNSAGDGRHVFVSTGGGFQLFDTGAWTEPHGDHTHSYTATPELTDITYSTDKPGHVVNHAGKTVLFGDGDGKIQIFDTASLLKGDEVEPEIKNALKAHHGVAVVLENGDLLHTLGDEDSRNGAVVFNAAGEEIARNEQCPGVHGESAALGDAIAVGCEDGVLIYKDGEFTKVQAPDSYGRIGNQSGSDVSPVVLGDYKVDKDADLERPERVSLTNTETGELTLVDLGTSYSFRSLGRGPAGEAVVLGTDGALHIIDANTGAITNTYPVIDAWTEPEVWQEARPTLFINKDRAYVSDPSNNELHVVDLANGNILASATLPGTPNELTGVSG

SEQ ID NO: 2731 - DNA, 303 bp, Corynebacterium glutamicum
  CDS (101)..(280): RXA02452
tttgcgcgactaatcgccggataaatgaattgattattttaggctcccagggattaagtctagggtggaatgcagaaatatttcctacggaaggtccgttatgacgcctgcaggtccagcacaattactcattgttgctcttgtagtaattgtcctctttggttccaataagttgcctgatgttgctcggtccgttggccgttcgatgcgcattttcaaatctgagatcaaagagatgaacaaggatcagatcgaaagctccgatcagaccttgaagaactaaggttcctcgcatctaaaaac

SEQ ID NO: 2732 - protein, 60 aa, Corynebacterium glutamicum
MTPAGPAQLLIVALVVIVLFGSNKLPDVARSVGRSMRIFKSEIKEMNKDQIESSDQTLKN

SEQ ID NO: 2733 - DNA, 858 bp, Corynebacterium glutamicum
  CDS (101)..(835): RXA02459
ggtgcgatcattggcctcgcggttgatggcgttcaggttgaagacattaagaccacttccaaaactttccctggttttgaaaatgtttgggaggagatggttggctagacgcagctatgacgaatccgatgttcgtgttcgcccaggtaaaggtacccgccctcgtacgaaggatcggccatcgcatgagaatgctctagtgggcatggttgtgacgaaggatcgtggtcgttggggtgttgttctcgatggtcgtcaagatgccattgtgacgatgcgtgcccgtgagttggggcgtacggctatcgaagtgggtgatcgtgtcggagttgtcggcgatacgtctggccgtccgggctcgttggctcgaattgtccgccttgaggagcgcacgagtgtgttgcgtcgtacggctgatgacacggacccgtttgagcggattgtggtggctaatgcggatcagttgttgattgtttctgctgtcgccgatccgccgcctcgggcgggttttgtggagcgtgctctaattgctgcgtttgttggtaatttgcagccggtgttgtgtttgacgaagtctgatttggcggatcctgcggagttcgctgcggagtttgaggctttggaagtgccggttgttgtttgtggtgttgatgatcctcttgatcctgttttggaggtcgtggaaggccatattacggcgcttattgggcaatctggtgtgggtaagtcgacgttggttaatcgtttggtgccggaatgccgatcgttaaactggtgtcgtgtcgggggttggcaagggtcggcatacgtcgacgcagtcggtcgctcttgccattgataatggttggattatcgaaa

SEQ ID NO: 2734 - protein, 245 aa, Corynebacterium glutamicum
LARRSYDESDVRVRPGKGTRPRTKDRPSHENALVGMVVTKDRGRWGVVLDGRQDAIVTMRARELGRTAIEVGDRVGVVGDTSGRPGSLARIVRLEERTSVLRRTADDTDPFERIVVANADQLLIVSAVADPPPRAGFVERALIAAFVGNLQPVLCLTKSDLADPAEFAAEFEALEVPVVVCGVDDPLDPVLEVVEGHITALIGQSGVGKSTLVNRLVPECRSLNWCRVGGWQGSAYVDAVGRSCH

SEQ ID NO: 2735 - DNA, 531 bp, Corynebacterium glutamicum
  CDS (101)..(508): RXA02461
agaaaatctcaaggcaaaaaacaagccaccccaatctgtgcgacaatcaaaccacagactacgactattatgtcacgaagaaaccaaagaaagggaaataatgcgcggactaattgttgactacgctggagtactagacggaaccgatgaggaccagcgtcgctggcgcaacctgctcgccgcagcaaagaaaaatggcgtcggaaccgtgatcctcagcaacgatccaggtgggctcggcgcagcgccgatccgggaactcgaaacaaacggggtagtcgataaggtgctgctgtcgggagaacttggcgtcgaaaagccagaggaagcagctttccaggccgccgcagacgccatcgacctgcccatgcgtgactgcgtgcttgtcgacgactcgatcctcaacgtgcgcggcgccgtcgaagccggactcgtaggcgtctactaccagcaatttgaccgtgcagtcgtcgaaatcgtcggactgttcgggctagaaggagaattctaatcttgcgcgtctacatccca

SEQ ID NO: 2736 - protein, 136 aa, Corynebacterium glutamicum
MRGLIVDYAGVLDGTDEDQRRWRNLLAAAKKNGVGTVILSNDPGGLGAAPIRELETNGVVDKVLLSGELGVEKPEEAAFQAAADAIDLPMRDCVLVDDSILNVRGAVEAGLVGVYYQQFDRAVVEIVGLFGLEGEF

SEQ ID NO: 2737 - DNA, 348 bp, Corynebacterium glutamicum
  CDS (101)..(325): RXA02467
gtgaacgtaggtctggggctttcagaagacacaacttagatactatcgttgcacggttacaatagggtcattccaatacaacgattcttttaggagagctatggatatcaagatcggatttgccgatactgcccgtgaactggtcatttcttctgctttgcagcaggatgaggccgctgcgaaggtgtcggaggctttggctaatgattctggcgttttagatttgagcgatgaaaagggtcgccgttacattattcgtaatagccgaatcgcttatgttgaggtcggcacgagtgctcctcgtactgtcggcttcgctggcgcataggggcttttagacacgtgtcg

SEQ ID NO: 2738 - protein, 75 aa, Corynebacterium glutamicum
MDIKIGFADTARELVISSALQQDEAAAKVSEALANDSGVLDLSDEKGRRYIIRNSRIAYVEVGTSAPRTVGFAGA

SEQ ID NO: 2739 - DNA, 414 bp, Corynebacterium glutamicum
  CDS (101)..(391): RXA02472
atgattctcataaggctataaacaatgtagttaggttacactaatggtgtccggttgtgaatagtgcagcggacggggttccgctgcggaggaggtcatcatgtcatttgttaacatcacggctcttacgttccctgcaggggctgaaaaagaaatcgaacaacgcttcgcggctcgtaagaaggctgtagatacggccaaaggattccaagaatttgagttgttgcgtccacaatttggtgaggatcgctacttcgtagttactcgttgggattcccgcgaagactatcaagcatggtcggatgcccgccctgccggtaaccatgctgatgatgaacaacgtggcatgagcgtggaagttcttggtttcgatgtggttcctttggaaggctaaaagtccttggcgtggcatag

SEQ ID NO: 2740 - protein, 97 aa, Corynebacterium glutamicum
MSFVNITALTFPAGAEKEIEQRFAARKKAVDTAKGFQEFELLRPQFGEDRYFVVTRWDSREDYQAWSDARPAGNHADDEQRGMSVEVLGFDVVPLEG

SEQ ID NO: 2741 - DNA, 864 bp, Corynebacterium glutamicum
  CDS (101)..(841): RXA02473
tgcagttatgattaaactaactcctagcagtggccaactacatgtctggcttaatagcctatgaacgcctaagcctggagccacaacaaccacattccgaatggtcgcagagtaccctgacggatcctcggaaatattcccggtaacgttaaatttaattccggaagataccctcgtttatgacgccgtctacaaattcaaaagcatccgaactggttccgaagatcaaataaccccatttgtatcaaaccaacctgatgtgcctttccctgcaggaacatcgttcacattaactggatattatgaaattgatcagctgagaagtgcaggatggaaatttgagcttaatcctgtaacaggtgaactttcagtcacagttcctatctctgtaatttaccctgatgggtctcgtgataacacaatcgcgaccatggaatccgtaggccctgatgattctgagcttttcaaaccagactttgatttaatcccaataaaatcaggtgactatatagagataggtgtactcgcaccagggcttcctgctggtacggaattccatctcgattactacgcacttccggatcgattctttgacttaggcggttctacaagcctttcaggcaacggtaagttctctcttggagttccacttacctggaatgatgatctccagctcccgatctcgattacttttcctgacggaagccacacagttgagaatttgcatgttgacgtaacccccgcaaactttgctggcaaccccattgacgagcctaaggacgatgacaaggatcatccacaaccggctcctaaaccaagtggcagctcatttggttctagctagttcctactaaacagttcaaa

SEQ ID NO: 2742 - protein, 247 aa, Corynebacterium glutamicum
MVAEYPDGSSEIFPVTLNLIPEDTLVYDAVYKFKSIRTGSEDQITPFVSNQPDVPFPAGTSFTLTGYYEIDQLRSAGWKFELNPVTGELSVTVPISVIYPDGSRDNTIATMESVGPDDSELFKPDFDLIPIKSGDYIEIGVLAPGLPAGTEFHLDYYALPDRFFDLGGSTSLSGNGKFSLGVPLTWNDDLQLPISITFPDGSHTVENLHVDVTPANFAGNPIDEPKDDDKDHPQPAPKPSGSSFGSS

SEQ ID NO: 2743 - DNA, 1278 bp, Corynebacterium glutamicum
  CDS (101)..(1255): RXA02475
tcgctcattgaggacggactcgcggaacaaaatgaggcgggttatttccacctgccacggtaaaccactgcgcgcctgcaaaaaacagtaggtttaagtaatgcttggtctctctcgtcgtaagtttgccatgctcgctgccttaactgcgggaatcgttggcgttgttgccactggttgtagtacgcccgcagaacctgaaacgatcgataatccggtgttcattggtatctccatcgatccaattaaaaacctaagtccgaatcacgctgcaaacctcttcgctttatctgcagatggctcgggaggaattttccaagaactcgctcccacatactttccgtcgatccatcgattaggaaacggattcatcgcacccgatagagattctttggtagttgtcgacgcttctctaaaggaagtttatcgacacgaagtggccaggcttggtgttggaatgcaaactcaatcagctaggtctccactgcataaatcagttgccttctccttcaatgaaggaacagctgaagccccatatagacaccgcatcgtctccgcaactgagaaaacatcagcttccgcaatgacagatcagcggcacttcgcgcttactgcatgcgatgacggatccacacggtgggtcgaatattcccctgaccgcggaatggaagatccaatgggccccggctcagcacgcatcgtgactctccaggccgacggagaactcagtgaaattgacgttgagtggaatttcccggatcggccctccgccccaattattctgtcttgcgaagatccaagcgcttatatagtttcagaagaagacatcatctatgtaaaagacgaggtaagccctgccgaatccataggaaaattacctgcatatgaaattccggaccgcgcccgattcgatacagtttccggcgaagactacttcgcttttacgtcaactgggatgctgacacgcatcaatattccccaagcaaaaatcgtctacgcacaatccattgacctctacggcaagcatccggtttccataactttcgattccgaccgtgcatacgtggttacttccggggattccggggaaagccttcttgaaatcgacttgaatgatccaacatgcacttcagatcagctctcgctcactggtttcaacaaattactcacagctcggaaacctaagccagaaccgtcgatcatcatcgaaaccatcttgccaattgacccaaactactcactgggttgtaagagttagattttggacggaagtgtgta

SEQ ID NO: 2744 - protein, 385 aa, Corynebacterium glutamicum
MLGLSRRKFAMLAALTAGIVGVVATGCSTPAEPETIDNPVFIGISIDPIKNLSPNHAANLFALSADGSGGIFQELAPTYFPSIHRLGNGFIAPDRDSLVVVDASLKEVYRHEVARLGVGMQTQSARSPLHKSVAFSFNEGTAEAPYRHRIVSATEKTSASAMTDQRHFALTACDDGSTRWVEYSPDRGMEDPMGPGSARIVTLQADGELSEIDVEWNFPDRPSAPIILSCEDPSAYIVSEEDIIYVKDEVSPAESIGKLPAYEIPDRARFDTVSGEDYFAFTSTGMLTRINIPQAKIVYAQSIDLYGKHPVSITFDSDRAYVVTSGDSGESLLEIDLNDPTCTSDQLSLTGFNKLLTARKPKPEPSIIIETILPIDPNYSLGCKS

SEQ ID NO: 2745 - DNA, 1345 bp, Corynebacterium glutamicum
  CDS (101)..(1336): RXA02478
gacatcgtcgaagcgctctccagcggcaacatcgacgattatcgcagcgccgtgctcgctcactacgcgccgtttcgccgcatgatttccaacatgctcgatgcgcactagcctcattgcgcgcgggttgtaccgcattcccgcgctggtctgggatcagggtcttttaacgcttttcgacgcccgcctcagtgttgacgacctccccgcacccatcgacgtggtgtcagcgcgatcctcagacggcatcacctggaccaccccagaaccagcaatcgtcgaaactgaacaccgcggtgtgggcgatgtctgccttgtcacgggcgatctgtgcttccacggattgtccaacctcgcaggattttttgaggatcccaccgaccttgaaccccggctggcgcgccgggatgtgagtgggtggacgtcgataagcatggcccactattttgcggatgttgatgccgcgttcgcctcgtcggggacgggacttgtcctggcggatgggcggtggattcagagttttgtggtgcggcgcgggcgcgagatttcgcttcggattctgcgcagcgatggccacatcaccgatattgccggcggtaacgaatccgcgatgacgcagctgccgagcggtcggattgtgctgcattccaggggggtgggacaccgtctgagcagtgtgtccgatgatttcggggagacattcactccgctggagcctgtgcctgaactaatcgaccccggctgcaacggccacgtgttctactggaaagcggctggaatgctcgccgcaacgcacctggcggaccctgatctgcgacgccacttggtggttgatttatccagcgacgaaggagcgacctgggcgcatcgcatcaccatcgagcgcgaagaagccgcctattcaaccgctgcggaaatgcccaacggagatgttgccgtggtgtgggaagcagagggaacgcgcgcgataaaatgcacggtgatcagcgtaaatgatatttcgctgcggatcgatgagcccatttccgatgccatatccctccgccatgtggtgatcaacgatgaccatgacggcatcgaagtcgcactgcctgacgcatcgcaatggggtgaaggtgtattcaaaattgtgtccaatccagacgcgagcacccaaaaaatccgcactcgaggcaagcccgcgcgacagaccctggaaattggggatgaattggtttttgatatccgcaagggtggagaagtggcttacggcgtcacggttccttatgatggtcgctcgttggggaagttaaacaggattttggagtggggctgtagaggccgatttgcggtcctttaattgcgg

SEQ ID NO: 2746 - protein, 412 aa, Corynebacterium glutamicum
MRTSLIARGLYRIPALVWDQGLLTLFDARLSVDDLPAPIDVVSARSSDGITWTTPEPAIVETEHRGVGDVCLVTGDLCFHGLSNLAGFFEDPTDLEPRLARRDVSGWTSISMAHYFADVDAAFASSGTGLVLADGRWIQSFVVRRGREISLRILRSDGHITDIAGGNESAMTQLPSGRIVLHSRGVGHRLSSVSDDFGETFTPLEPVPELIDPGCNGHVFYWKAAGMLAATHLADPDLRRHLVVDLSSDEGATWAHRITIEREEAAYSTAAEMPNGDVAVVWEAEGTRAIKCTVISVNDISLRIDEPISDAISLRHVVINDDHDGIEVALPDASQWGEGVFKIVSNPDASTQKIRTRGKPARQTLEIGDELVFDIRKGGEVAYGVTVPYDGRSLGKLNRILEWGCRGRFAVL

SEQ ID NO: 2747 - DNA, 933 bp, Corynebacterium glutamicum
  CDS (101)..(910): RXA02482
aaacggtggcgccttaattgttttacgcgtgctgacaggaaccttttaggtgattaacctggtttgcaactttccaacctcagccggataaggaacactagtgggcgtggctaaatcaaagaaatctgctttacctaaagtcctgctcaccatcgtggtgatcctgctcctgctcgtgctggtagcagaattcgggctgcgcttcatgatcggaaaacaactgaaagatgagttccaagctcaggcttcctcacaaggaatctctgcaactgaagagccctccatcagcttcggcgcatccccactcctgttaggcatcgctcggggaagcatcaatgaagtcacaatcgacacccccgactccgtatccatcactaaccaagacggtgtcccctccatcagtggcacaccagagtcaactatccaactccaagggcttgatatcggtgaccgcgacaacccagtcgcagaccacctcaccttaaccacattggcaaccgacgatttcatcctggcaaccatccaacagcagatggccgaagcaaccggcgggaacagcacctcccaaggattcgcagaacagcttatccaggaactcatcaaagtcaccgacattacttccgatgcagctaatcaaaccatcgaagttgaattcaccgacggcgccgcccgagcctcactgcaccccatcgtaacgaacggccaactcggctttgagatcgtagattcccaactcttcggattcggcctccccgatgaaatctcccaaatgctcaccgacgcactgcaatcatcaatcaatgaagtagccggtggcctgcaaatccaaagcctcgaagttgtcgacgctggcatcaacgtcaccctgaccggagacaacatcaacatccagaccctagaagccgcacagtaaagagcgctttcgcgtctgtg

SEQ ID NO: 2748 - protein, 270 aa, Corynebacterium glutamicum
VGVAKSKKSALPKVLLTIVVILLLLVLVAEFGLRFMIGKQLKDEFQAQASSQGISATEEPSISFGASPLLLGIARGSINEVTIDTPDSVSITNQDGVPSISGTPESTIQLQGLDIGDRDNPVADHLTLTTLATDDFILATIQQQMAEATGGNSTSQGFAEQLIQELIKVTDITSDAANQTIEVEFTDGAARASLHPIVTNGQLGFEIVDSQLFGFGLPDEISQMLTDALQSSINEVAGGLQIQSLEVVDAGINVTLTGDNINIQTLEAAQ

SEQ ID NO: 2749 - DNA, 936 bp, Corynebacterium glutamicum
  CDS (101)..(913): RXA02483
catgggccctgcaatcgagcctaaggttgccgacgcactcggcgagctcttcgcaaacgaaggcgctctgaccgaaaagtggatctccgagaacctctaaatggctgatcacgcccacaatctgcgcgcctctttccgcaagggtgcaaacggaaagcagaagccaatcggcgtgatcacccgcggcaccaccggtgtgaaccgcctacggcgcttcgatcggtggtgctttcatcatcccaaaatacgttcgcttctcgacgccacttccctggcgttagatgtcgggtacggcgccagccacacaaccaccgtcgaatggggacgttggctccaccgcctccaacccgacatggatgtcatcggcctagaaatcaaccccgaacgagtcctcgaaccccaaaacggcgtgtcctttgaactcggcggattcgaacttgccggctacaccccacaactcgtgcgcgccttcaacgtgctgcgccaatacgacgtggaccaagtcgaagccgcatgggaaaccgtcacctccagacttgccccaggcggactgtttttcgaaggcacctgcgatgaaatcggcaaacgctgcacctggatcacacttaactcagacggcccacaagaactcacccttgcatgggatccttggggaatctccaccccctccgatgtggccgaacgactgcccaaaatgctcatccaccgcaacattcctggtgaaaagattcacgcactgctagcagccgctgatttagcctgggactactgcgccggctgggaaccccacggaccgcgcgtgcgctgggaaaaagcccgcgagatgctcatcgaccaaggttggcccatcgcagtgtccaggcgacgcgtgggcgatagcctgctgactgtaccgtgggaaacggtggcgccttaattgttttacgcgtgctgaca

SEQ ID NO: 2750 - protein, 271 aa, Corynebacterium glutamicum
MADHAHNLRASFRKGANGKQKPIGVITRGTTGVNRLRRFDRWCFHHPKIRSLLDATSLALDVGYGASHTTTVEWGRWLHRLQPDMDVIGLEINPERVLEPQNGVSFELGGFELAGYTPQLVRAFNVLRQYDVDQVEAAWETVTSRLAPGGLFFEGTCDEIGKRCTWITLNSDGPQELTLAWDPWGISTPSDVAERLPKMLIHRNIPGEKIHALLAAADLAWDYCAGWEPHGPRVRWEKAREMLIDQGWPIAVSRRRVGDSLLTVPWETVAP

SEQ ID NO: 2751 - DNA, 624 bp, Corynebacterium glutamicum
  CDS (101)..(601): RXA02484
cggcgaaagtgacttccgaatcgagttcgacgccgtcgatcgcggcgatttcctgggctagcgatgaatccaacaccccactaacggtagtcttatcctcatggcaacgcgtacagaaaacaccattacgatcaatcagcccgtcggcaaggtgcaccaagcactgaccaccgaagcctactgggcatacatcgcagagaacctctcccccgaagctggcgaggtcaacgagttcaccgcagctgacggtggcgcaaccgcaaccctttttgaggtcctcccactcgaggtcctcccagaggcagttcgcgcaatgatcagccaggcactgaaggtcaagcgagtcctcacggttcctgcactgaccaacaacgccacaaccgtcgagtacaacgctgacgtcaagggcacccctgttgatttcaagggcaccatcgccatcaacggcgacgacgcagcaaccaccttcgactacagcaacgaagtgtccgtgaacatcccattcatgggccctgcaatcgagcctaaggttgccgacgcactcggcgagctcttcgcaaacgaaggcgctctgaccgaaaagtggatctccgagaacctctaaatggctgatcacgcccacaa

SEQ ID NO: 2752 - protein, 167 aa, Corynebacterium glutamicum
MATRTENTITINQPVGKVHQALTTEAYWAYIAENLSPEAGEVNEFTAADGGATATLFEVLPLEVLPEAVRAMISQALKVKRVLTVPALTNNATTVEYNADVKGTPVDFKGTIAINGDDAATTFDYSNEVSVNIPFMGPAIEPKVADALGELFANEGALTEKWISENL

SEQ ID NO: 2753 - DNA, 759 bp, Corynebacterium glutamicum
  CDS (101)..(736): RXA02486
tccgacctcgtcgcattagccaaagaaatccgcgacggagtcctcgaaaccttcggcgtcaccctcgtcccagaacccgtctggattggaatcagcatcgatgactgaattttccgacgtccctggcaccgccgccccactgcacagggcgttggaaaatgccggatactccactttagaatccctcgacggtgttccctacaagacgttgattgccctgcatggtgtcggaaaaactggcctcggcaggatccaggcagcattgttggaacgtggcctttccctgggggaagaaacaaaaggcgccaccatcaccccaggtcacaccggtaaagtggcctcagatatcaaaactcacatcacttccgtggatcccgtcgcatacgtcgatggtctagaggggcgtcgggttgctcacgggcaccaattgctatcgatcttcggtcgcgtcaccggcgcggaacccaaaatgtggggaccctccatgatcggatacggctcagtccactacgtttcccacaccggaagggaaggcgattggtttcagtgtggtttcagcccggcgaagtccaaaatctgcctgtatggcctgaaggattcgcctcgcggtgaggaattgctgcagaaacttggaaaatacaccgaaggccgcggatgcgtgtacatcaataaaccggaagacatcgatttggatgttttagaggccatgatcagcgagtcatgggccggccaaggctaggttgcaaatccccaccacaa

SEQ ID NO: 2754 - protein, 212 aa, Corynebacterium glutamicum
MTEFSDVPGTAAPLHRALENAGYSTLESLDGVPYKTLIALHGVGKTGLGRIQAALLERGLSLGEETKGATITPGHTGKVASDIKTHITSVDPVAYVDGLEGRRVAHGHQLLSIFGRVTGAEPKMWGPSMIGYGSVHYVSHTGREGDWFQCGFSPAKSKICLYGLKDSPRGEELLQKLGKYTEGRGCVYINKPEDIDLDVLEAMISESWAGQG

SEQ ID NO: 2755 - DNA, 392 bp, Corynebacterium glutamicum
  CDS (1)..(369): RXA02488
aagctgactgcaactggtgtcgatgtcatgggcaccttctacccagaaggtgaagcacttgcgccaatcactttgaacctcaccaacgaagttgtatgcgacgagcctgaaacccccgttgagcctgaggttcctgtagagcctgagactccagtagatccggaaacctcggtcgacccagagactccagtagatccggaaacctcggtcgacccagaaaagcctggcgatgacaacaaggatgacggaagcaacagcagcagcaacggcgatatcctcggaatcttgggcatcctcgcagcgcttggtggcgttggtgcacttgtgtacaacttcctggtagctagcggattccttgcagcgtttaagtaaatgaatcgttttcctagtgc

SEQ ID NO: 2756 - protein, 123 aa, Corynebacterium glutamicum
KLTATGVDVMGTFYPEGEALAPITLNLTNEVVCDEPETPVEPEVPVEPETPVDPETSVDPETPVDPETSVDPEKPGDDNKDDGSNSSSNGDILGILGILAALGGVGALVYNFLVASGFLAAFK

SEQ ID NO: 2757 - DNA, 724 bp, Corynebacterium glutamicum
  CDS (101)..(724): RXA02489
tatcctcggaatcttgggcatcctcgcagcgcttggtggcgttggtgcacttgtgtacaacttcctggtagctagcggattccttgcagcgtttaagtaaatgaatcgttttcctagtgccttattagcagcctctgtcgcgggggctgcgttggccattccagcgacctctgcacatgcagcagaatctatttgtacattcaccggcgatgttgggtggaatgtgcgcgattctttcaacagttatcttttgggaaacatcgcaaatggtagtgcttataaatataagggcgggttggacgttcgtgacggcgtccagaccgacggtaacggcaaaactccagcactgacctggccagttgattcggtgacgtcttcgaagatttccacttccggaggcgcgcactggaccggacacaacctgtaccccggtgatgacctcgcggaagtccctaacaatttcacgttggatcttgatttttccaacatcactgtggagctgagtggttctacaggtcggttgttggtggattacacatctcgggaatacatcaacacccacacgttgggtgagtttcaaactggtgaacaggctgagcttgccacgattacttttgccaaagctccagacctcacctctaattcagtcaacgtgactggcgatgtggcattgactgctgatggtgtggaagttttcggtggtttctacacggcaggggaggag

SEQ ID NO: 2758 - protein, 208 aa, Corynebacterium glutamicum
MNRFPSALLAASVAGAALAIPATSAHAAESICTFTGDVGWNVRDSFNSYLLGNIANGSAYKYKGGLDVRDGVQTDGNGKTPALTWPVDSVTSSKISTSGGAHWTGHNLYPGDDLAEVPNNFTLDLDFSNITVELSGSTGRLLVDYTSREYINTHTLGEFQTGEQAELATITFAKAPDLTSNSVNVTGDVALTADGVEVFGGFYTAGEE

SEQ ID NO: 2759 - DNA, 2691 bp, Corynebacterium glutamicum
  CDS (101)..(2668): RXA02495
aaggaggaaaattatcaccgtcttaaaaacggctaaggcttttctaaattcgccgctgcgcaccatcacgtggcgcagcgttgtggcgaataaactccgcatggcattaacagtgctttcggttgtgctaggaaccgcatttttgtgtggctccctcctcctcacacattcccttgaaagaacattttcctccatcgttgatgccggcgtggagggcgttgacgtgggcgttatcgcgcaacaaaacaaccccgacggcgtacctttctccgtcatcgccgaaattgagcagtatccggaagtccgcgccgtcaacatcatcggcgacggccccggcatgccctccggcaccaccatgaccggccaatccgcgctgatcctcaccgactccgacggcaatcccctgcaagcaggcagctccggcacgcacccgctagccatttatccgcagggcgagtgggtctcgcccgagccaacgcttatcgacggccacttccccacaaaacccgacgaggtagtagtcaacgcttcggccgccaaacgtggcgggctctccctcggtgatcacctaacgatcgtcacacccaccgaacgcatcgacgccaccctgtctggaaccttcgaatcaaacaccgacgtcgcaggctgggtcggagtcggattcaccccacagcgctacgtcgaactgctcaccaacggcaccgacgccagccaaatcaccatcgcagtcaacgacggcgccgaccccatggcagtccgcaaccgcatcggcaaaaaccaccgggacctgctgcccctgctgcccgagcaaatcatcgaccaaaccaccggcgacaccgaccgccaactggagttcatgacctacgtgctcctggcattcgccgcgatcgcactgattgttggctcgttcatcattgccaacaccttcgcgatgatcgtcgcccaacgcaccggcgaattcgccctcctccgttccattggtgtctccacgttccaaatcggattctccgtgattatggaagcagtattcgtcggacttatcggcggtttcatcggcatcgcagttggcttcggagtggtcaatgcacttgtccaagtgctcaaccaattcggcgacaccctctcctccatcgacatcacctacaacgccggatccttcatcttccctgtcctcttcgccgtcactgccaccgtactaagctccatatcgcctgctcaccgcgccggtaacctcccaccagtccaagcattcgaatcctccgatgcacgcagcgacgccctcggaaggatccgcttcctcgtcgccgccgtcatgctcacccttggaatcagcctgacgatcgcaggtgccgtggtatccgccatcaacggagatgaattcaaaacagaaacacgcctcgcattcatcggcgctggacttctcttagtgttcttctcactctccctgtccggtcccgcactgatggtggcgacctctcagactcttggcgtggcgataatgtcgccgttccgagccgtcggcaagctcgcacaacgcaacaccctgcgcaatccgcgacgctccgcaaccaccgcactggccgtcactttgagcgttggcctcgtcgcctgcgttggagtcatcggcgccaccacccgcgccagcgtcttcgggtccatggaatccaccatcaaatccccatatgtcctcgacagcatcggtggcaccatgatccctggacaacccgccggcggttcaaggtcactgtccatgtccgcagccgtcgcacaggaaatcgcacaaacccgcggagtcggcaaagtgggcaccctcatgaccggcagcgtccaagtcaacggatgggacaacgaaaacaccacaattttcgacggcgacctctctcagttcctcgacctcgcagtccgctccggcgacgccttcgacgacgaaacccccggcgtcatgatctccaccacctacgccgaccaatccgacctcgaagtaggcgacaccgtcaccgtcaacccctacggatccgacgacggcatccgcgtccccatcaccggcatctacgcagaaaccaacctcgtcggacacctcatggtcaacgcagccgccaccaaccgagtcctcacctccgcggacacctaccaccggtcccaaatcttcgtcaacggcgacggctccaccaccaacgaagaactccgcgacatcctcgtcgacgccgtagcccccttcctcatcgtccaagtgaaatccaaagatgaattccgcggaagcctcggcacccaaatcaaccaattgctcggcatcatctacggactgctcgccctggcagtgatcatcgcagtcctgggaatcgtcaacacactgttcctctccatcagcgaacgcacccgcgaaatcggaatcctccgcgccaccggcgtccaacgaggacaaatccgccgcatgattaccctcgaatccgtcatcctctccatccacggcgcaatccacggactcctcctaggtacatttatcggctgggcaatcgtcagttgtctccgcacccgaggcatggcacccgtcgaattcccctggacccaaatcggattaatgctcatctccgcaatcatcatcggaggcatagcagccctcatcccagccaaccgagcctcccgaatctcccctttggaagcaatcaactaacagtctgcatcggcaacctc

SEQ ID NO: 2760 - protein, 856 aa, Corynebacterium glutamicum
MALTVLSVVLGTAFLCGSLLLTHSLERTFSSIVDAGVEGVDVGVIAQQNNPDGVPFSVIAEIEQYPEVRAVNIIGDGPGMPSGTTMTGQSALILTDSDGNPLQAGSSGTHPLAIYPQGEWVSPEPTLIDGHFPTKPDEVVVNASAAKRGGLSLGDHLTIVTPTERIDATLSGTFESNTDVAGWVGVGFTPQRYVELLTNGTDASQITIAVNDGADPMAVRNRIGKNHRDLLPLLPEQIIDQTTGDTDRQLEFMTYVLLAFAAIALIVGSFIIANTFAMIVAQRTGEFALLRSIGVSTFQIGFSVIMEAVFVGLIGGFIGIAVGFGVVNALVQVLNQFGDTLSSIDITYNAGSFIFPVLFAVTATVLSSISPAHRAGNLPPVQAFESSDARSDALGRIRFLVAAVMLTLGISLTIAGAVVSAINGDEFKTETRLAFIGAGLLLVFFSLSLSGPALMVATSQTLGVAIMSPFRAVGKLAQRNTLRNPRRSATTALAVTLSVGLVACVGVIGATTRASVFGSMESTIKSPYVLDSIGGTMIPGQPAGGSRSLSMSAAVAQEIAQTRGVGKVGTLMTGSVQVNGWDNENTTIFDGDLSQFLDLAVRSGDAFDDETPGVMISTTYADQSDLEVGDTVTVNPYGSDDGIRVPITGIYAETNLVGHLMVNAAATNRVLTSADTYHRSQIFVNGDGSTTNEELRDILVDAVAPFLIVQVKSKDEFRGSLGTQINQLLGIIYGLLALAVIIAVLGIVNTLFLSISERTREIGILRATGVQRGQIRRMITLESVILSIHGAIHGLLLGTFIGWAIVSCLRTRGMAPVEFPWTQIGLMLISAIIIGGIAALIPANRASRISPLEAIN

SEQ ID NO: 2761 - DNA, 930 bp, Corynebacterium glutamicum
  CDS (101)..(907): RXA02496
cgggacgcgcgtctactgcaactaggtggacagtattgctgcccacatctaatacacctaatctcacacctaaaggttagacggtctagggtggcaaagtgtgaatcggtcaaattcttcttcggtatttttaggtttccccgagtcttcgccagcggcggcatcgattcgtgctggggaggaactccctcttgatttcccacgtgaatggtatgaattcacggatccaactgatattgagcatgtatttagcatcgatttaacgtggcttgagtctaattggaattgcacctttggtacccccgattgtttaggtattgattccgaaaacgccgacgtgggttgttgcggccacggtgcattcttagcagatgagacagatcgagatcagctttatgatgccgttgctcagatgcccgctaagtattggcagctacgccccgcctccacggactcgtttttagcatccgatgacggcaccgacattgagccgtggctgacatgggatgaattagatgatgaagacggcaatcccgagcccgctttgaagacaactgtggtcaacggcgcctgtatttttgccaacagggcgggttgggaaacaggcgcggggtgtgcgctgcatcagtggggcgtgaacgcaaatgaggatctaaccgtcgtcaagcctgaagtttgttggcagctcccgctgcgccgcctggaggcctgggaagagcgccccgacgggcaagaaatcttgcgcaccacaattactgaatacaaccggcgcggctggggcaacggcggcgaggatttcgactggtactgcaccacctctccgcgctgccacaccaatgccgaacccatgtggaaaacacaggaaacagaactccgtgcactcatgggaccaaactcctacgaggtgtgacgtaaatatttggaagcacg

SEQ ID NO: 2762 - protein, 269 aa, Corynebacterium glutamicum
VNRSNSSSVFLGFPESSPAAASIRAGEELPLDFPREWYEFTDPTDIEHVFSIDLTWLESNWNCTFGTPDCLGIDSENADVGCCGHGAFLADETDRDQLYDAVAQMPAKYWQLRPASTDSFLASDDGTDIEPWLTWDELDDEDGNPEPALKTTVVNGACIFANRAGWETGAGCALHQWGVNANEDLTVVKPEVCWQLPLRRLEAWEERPDGQEILRTTITEYNRRGWGNGGEDFDWYCTTSPRCHTNAEPMWKTQETELRALMGPNSYEV

SEQ ID NO: 2763 - DNA, 927 bp, Corynebacterium glutamicum
  CDS (101)..(904): RXA02498
caaggtagaaatttgtccgtgggcacttcgtgaaggtgtgatcctcaccaggatcgacaaaggactcgagtaacatttacccggaaaggagttggcgaaaatgagtgaagagaaactcacagtcgctgagctgatggcgcgtgccgcgaaagagggacgctccaccgatgctccccgacgacgcaggcgccgcagcatcgaagacggtggcgtatccgttgctgagctgaccggctccattcctgccgttaaggaaaagcccgcggagtccaagcactccagcgtgcccatcgatgcaccagcagaacctgaggttgttgaggcccccaagcctgagcccgccgaagaagtagaagtggcttcggtggagggcgacgtcgataagcaggaaacccctgagcgtccggcgccgagcaacgaagaaaccatggtgctgcgcatcgtggatgaaaaagatccaattagcttgacgacgggcgcgttccccgtggttccggcagttgccgccaagccggcgcccgtagtgcgcgcggagaaggacgccgatgtggagactgccgtaaaggcagatttcgcagaggtggaagtcgataacactgacaccacgcagatggctgtggtggaagaagttgacgaggagccagagcaagaaaacaaaatgtccgtattcgcgatcatcatgatggcgatcgtcggagttgttctcggtgtcgttgtattcctcggctttgaaatgctgtgggagcgcctgaacaagtggatcgtcgctgttctggcagtcggcgtgaccttgggaatggtgggcatcatccacgctttgcgcacctcacgtgatggtttcagcatggttctcgcaggaatcgtgggcctggtcatgacgttcgggccgctggcaatcgtcatgtaatttgtcgttttgggcccccg

SEQ ID NO: 2764 - protein, 268 aa, Corynebacterium glutamicum
MSEEKLTVAELMARAAKEGRSTDAPRRRRRRSIEDGGVSVAELTGSIPAVKEKPAESKHSSVPIDAPAEPEVVEAPKPEPAEEVEVASVEGDVDKQETPERPAPSNEETMVLRIVDEKDPISLTTGAFPVVPAVAAKPAPVVRAEKDADVETAVKADFAEVEVDNTDTTQMAVVEEVDEEPEQENKMSVFAIIMMAIVGVVLGVVVFLGFEMLWERLNKWIVAVLAVGVTLGMVGIIHALRTSRDGFSMVLAGIVGLVMTFGPLAIVM

SEQ ID NO: 2765 - DNA, 222 bp, Corynebacterium glutamicum
  CDS (101)..(199): RXA02500
acgcgggttagatttttgctcgcgatccgaaagtgcacttcggcaaaaagtgctggcaggttttgtacgtacaacatcgatttaagcgagggaaaccgtaatgggttctgtcatcaagaagcgccgcaagcgcatgtccaagaagaagcaccgcaagatgctgcgccgtactcgtgtccagcgtagaaaattgggcaagtaagccttcaattgagcttcaaa

SEQ ID NO: 2766 - protein, 33 aa, Corynebacterium glutamicum
MGSVIKKRRKRMSKKKHRKMLRRTRVQRRKLGK

SEQ ID NO: 2767 - DNA, 1005 bp, Corynebacterium glutamicum
  CDS (101)..(982): RXA02506
cctttccctgaactctaagcaattgtgatctatagtacaaatgcataaacattaaccgtgatatccatctcttgcataccggccgaaaggtttagcacacatgcacctcaatcagctcgaatttttcatcgcagtagcccaacacggacagatcaaccgcgccgccgaagaactcctcatttcccaacccgctctcagccgacagatctccgcacttgaaaaatccgtcggagctccactcttcgaacgccattcccgcggtgtctccctcacaaaggccggagaaatcctccacgaagaagccctccgaacgcttagcaggatgcaatcggtagtcgatgaaatccaatccggtgagcacctcatcaccagcatcaacatcggagttccccctggaatccccatcgactggttgcgctgccaactcatcgatttaggccccgagacccgcatttcactgatcgaatcccccaccgatgatcagctaaaacttcttaaacaacgcgaactcgacatcgccctttgtcgacgccaaagcgaggcctttgccaccacacttgtccacgaacaagaactgggaatcgtcgtccgaaaaaactccgaactgcaccaaaaagtcgcaggaaaagacaacgccacactcttcgatcttgaagggcttcgagtcctcgcacactcccgcggtgaagtaagaattcaggaagaaatcctcaaaaacgccatgctcgccgcaggagttaatgccacgtggatcttccgaaaatttgggcaatatagctcactgatcgcagaccttgtccaggccgatgtcgcactcacaacagaggaatccgcccgcaccaacttccccagctggcaatgggtccccatcgaaggcgaagacgcctccggaaatgaccttgttgttcgcacctggatcacctggaacccccaacccacccccgcggtgaaggccctgatccagaaatttattgacggaaactgagttctaaacagccgccatga

SEQ ID NO: 2768 - protein, 294 aa, Corynebacterium glutamicum
MHLNQLEFFIAVAQHGQINRAAEELLISQPALSRQISALEKSVGAPLFERHSRGVSLTKAGEILHEEALRTLSRMQSVVDEIQSGEHLITSINIGVPPGIPIDWLRCQLIDLGPETRISLIESPTDDQLKLLKQRELDIALCRRQSEAFATTLVHEQELGIVVRKNSELHQKVAGKDNATLFDLEGLRVLAHSRGEVRIQEEILKNAMLAAGVNATWIFRKFGQYSSLIADLVQADVALTTEESARTNFPSWQWVPIEGEDASGNDLVVRTWITWNPQPTPAVKALIQKFIDGN

SEQ ID NO: 2769 - DNA, 860 bp, Corynebacterium glutamicum
  CDS (1)..(837): RXA02514
aactcccacaacccaaccccagtaaccatcacggttactggcaagggtgaaggcgttacctctttcggcgcaatctccatcgaggttgaagcgggcgcagacgctatcgtcgcactgcagtacgtcggatccggcacccacgctgacaacgtcgaattcatcgttggcgacaacgcacgcctgaccgtcatcacggacacccactggaacgctgacgcagttcacctgagcaaccagcttgcacagctgggacgcgacgcaactctacgccacaccgtggcaaccttcggtggagaagtagtccgcatcgtcccacgcgtgcgtttcaccgcaccaggtggcgacgcagaaatgctcggcgtctacttcgcagatgatggacagtacttcgagcagcgcctgctggttgaccacgctgtaccaaactgtcgctccaacgtcttgtacaagggcgcacttcagggtgacaagaactctgacaagccagatgcccgtacctgctgggttggcgatgtgctcatccgctcaaacgcccacggcactgacacctacgaagctaaccgctcactcgtcctcaccgagggtgcacgcgcagacgctattccaaacctcgagattgaaaccggccagatcgttggcgcaggacacgcagcaaccgtcggtcgtttcgacgacgagcacgtgttctacctccaggcccgtggtattcctgcagaggaagcacgccgcctcatcgtccgcggtttcttcaacgaagtgatcaacaaggtcccagttgaatccatccgcggggaattggacaaccgagtcagctcggaactcgcagttcttggcatgtaattaagccaaagtaactaagc

SEQ ID NO: 2770 - protein, 279 aa, Corynebacterium glutamicum
NSHNPTPVTITVTGKGEGVTSFGAISIEVEAGADAIVALQYVGSGTHADNVEFIVGDNARLTVITDTHWNADAVHLSNQLAQLGRDATLRHTVATFGGEVVRIVPRVRFTAPGGDAEMLGVYFADDGQYFEQRLLVDHAVPNCRSNVLYKGALQGDKNSDKPDARTCWVGDVLIRSNAHGTDTYEANRSLVLTEGARADAIPNLEIETGQIVGAGHAATVGRFDDEHVFYLQARGIPAEEARRLIVRGFFNEVINKVPVESIRGELDNRVSSELAVLGM

SEQ ID NO: 2771 - DNA, 534 bp, Corynebacterium glutamicum
  CDS (101)..(511): RXA02518
cgcgtgaagtgcgcgctgcttgggtggaaggctttccaggcggcaaccgctgacgctgttgcgcacgcacattagcccgctgtattaattggaggaaaccatgagcgagcacaccgagaacacgacagaggttgaagaccagaacgcttccacctttgaagcacaaagctctgagcgcccagagcagtccgaggcagacctggctaaggccagcgatgttgaggagtacatgcgcgacgttattgaccctgaactgggcattaacgttgttgacctgggccttgtctacgatatttacatcatcaacggcaacgaagctcacatcgatatgactctgacttcaccagcttgcccgctgactgacgtcatcgaagatcaggcacgcaccgcaatcgtcggcaacggcattgcagagaagatgtccctgaactgggtatggatgccaccttggggtccacacatgattaccgaagagggccgcgctcagctgcaggccctaggattcgcggtttaaaaggctgcttatcgacgcca

SEQ ID NO: 2772 - protein, 137 aa, Corynebacterium glutamicum
MSEHTENTTEVEDQNASTFEAQSSERPEQSEADLAKASDVEEYMRDVIDPELGINVVDLGLVYDIYIINGNEAHIDMTLTSPACPLTDVIEDQARTAIVGNGIAEKMSLNWVWMPPWGPHMITEEGRAQLQALGFAV

SEQ ID NO: 2773 - DNA, 1566 bp, Corynebacterium glutamicum
  CDS (101)..(1543): RXA02521
gcacacgcaaccattggcaacaatcgcggacggccacggcatctgcacaacaaatattgcattgacacccatcaaacactcctgatgaaaggagcggatcatgacttcggcaacgacgaacccaggggttaacgagcccttgaccgatgaccagatcattgaatccatcggtccgtacaactatggttggcacgactccgacgacgctggtgcatccgcacagcgtggtctcagcgaggatgtcgtacgcgacatctctgcgaagaagagcgagccagaatggatgcttcagcagcgcctcaaggccctgagcatttttgataagaagccagttccaacctggggtgcagacctttcaggcattgacttcgacaacattaaatacttcgtccgctccactgagaagcaggcacagtcctgggaggatctcccagaagacatcaagaatacctacgacaagctgggtattcctgaggccgagaagcagcgcctcgttgcaggtgttgcagctcagtacgagtctgaggttgtctaccaccagatccgcgaggacctggaggaaaagggagttatcttccttgacaccgataccgcactgaaagagcaccctgagatcttccaggagtacttcggcaccgtcattccagcaggcgacaacaagttctccgcactgaactccgctgtctggtccggtggatctttcatctacgtgccaaagggtgtccacgtggacattcctctgcaggcttacttccgcatcaacaccgagaacatgggtcagttcgaacgcaccctgatcatcgttgatgaggatgcctacgttcactacgttgagggctgtaccgcacctatttacaagtccgactccctgcactccgcagtcgttgagatcatcgtgaagaagggtggacgctgccgctacaccaccattcagaactggtccaacaacgtctacaacctggtgaccaagcgcaccaaggttgaagagggcggcaccatggaatgggtcgatggcaacatcggctccaaggtcaccatgaagtacccagctgtctggatgactggcccacacgcaaagggcgaagttctctccgtcgctttcgcaggtgagggacagttccaggacaccggcgccaagatgacccacatggctccttacacttcctccaacatcgtgtccaagtctgtggcacgtggcggtggacgtgcggcttaccgtggtctggttcagatcaacgcaaacgctcaccactcaacctccaacgttgagtgtgacgcactgctggtcgatgacatctcccgttctgacacctacccatacaacgacatccgtaacgatcacgtgtcactcggccacgaggcaactgtttcccaggtttctgaagagcagctgttctacctcatgagccgcggacttgcggaagaagaagcaatggcaatgatcgttcgtggcttcgttgagccaatcgctaaggaactcccaatggagtacgcccttgagctcaaccgactgatcgaactgcagatggaaggatcggtgggctaagcccaatgactgaagtagca

SEQ ID NO: 2774 - protein, 481 aa, Corynebacterium glutamicum
MTSATTNPGVNEPLTDDQIIESIGPYNYGWHDSDDAGASAQRGLSEDVVRDISAKKSEPEWMLQQRLKALSIFDKKPVPTWGADLSGIDFDNIKYFVRSTEKQAQSWEDLPEDIKNTYDKLGIPEAEKQRLVAGVAAQYESEVVYHQIREDLEEKGVIFLDTDTALKEHPEIFQEYFGTVIPAGDNKFSALNSAVWSGGSFIYVPKGVHVDIPLQAYFRINTENMGQFERTLIIVDEDAYVHYVEGCTAPIYKSDSLHSAVVEIIVKKGGRCRYTTIQNWSNNVYNLVTKRTKVEEGGTMEWVDGNIGSKVTMKYPAVWMTGPHAKGEVLSVAFAGEGQFQDTGAKMTHMAPYTSSNIVSKSVARGGGRAAYRGLVQINANAHHSTSNVECDALLVDDISRSDTYPYNDIRNDHVSLGHEATVSQVSEEQLFYLMSRGLAEEEAMAMIVRGFVEPIAKELPMEYALELNRLIELQMEGSVG

SEQ ID NO: 2775 - DNA, 813 bp, Corynebacterium glutamicum
  CDS (101)..(790): RXA02524
gacgcgatcaggcgctcctacgcacccaggcaattaggcctgagcttatcgacgcatccctcctcgattccaccgacctcaaagtattgggactggacaaatgacagagaccacacctcaacccccaaagccagagcccgagctcccgaaatttctcagcaacccagaacgcgccgacatcattttgttcatcgcactcattgtgatgggcattttctccctctgcatgatcccactgcgcgcctggatgctcacccaacctctggcctacaccctcatcgtcggtggttacaccagtgcagtcgtgggcggcgcgaacgcttcggtagaaaacggcatctggtgggtctactggctctgcaccctgatcggcgcgctgaagttcatgcccgtctattggctgatgggtaagcgctggggcatggaatttatcgacatgtccctccaatacatgccccgcttccaccgcatgttcaaaaaatccgtcgactccgaatccacccgcctctacgcctggatcatcggcctcattccactcgcatacctcccaggaccagtgccgggaaccatccttaacgcagtggctgggctggtgaaaatccccttctggatcatcatggcctggaatgcgatctgcgtactatcggtcaacggactattcatgtggctgggatacaccttcggcgaacaagtcctcgacatcgtcaacgtggtcaaccgctacatgctttggataaccttaggattgctggcgctgatgtttttccgcgcacggaagcaatttgccaagtaaatggttgaaaggaatatgac

SEQ ID NO: 2776 - protein, 230 aa, Corynebacterium glutamicum
MTETTPQPPKPEPELPKFLSNPERADIILFIALIVMGIFSLCMIPLRAWMLTQPLAYTLIVGGYTSAVVGGANASVENGIWWVYWLCTLIGALKFMPVYWLMGKRWGMEFIDMSLQYMPRFHRMFKKSVDSESTRLYAWIIGLIPLAYLPGPVPGTILNAVAGLVKIPFWIIMAWNAICVLSVNGLFMWLGYTFGEQVLDIVNVVNRYMLWITLGLLALMFFRARKQFAK

SEQ ID NO: 2777 - DNA, 501 bp, Corynebacterium glutamicum
  CDS (101)..(478): RXA02525
cgtggtcaaccgctacatgctttggataaccttaggattgctggcgctgatgtttttccgcgcacggaagcaatttgccaagtaaatggttgaaaggaatatgaccaccatgcgagaagtttcaaccgacctcaacatcctcatcgtccccagcgaatgggaaaaagtactagaaaacctaccagcgacattgagtgagtccggattcgtagcctctgaaatccactcccagatcgtcgacctcacctgcgaacccgacaacatgcttgtcacccagttctcccagctagagggccacccaccaattgtggaagtgctccaccgcctagtaattaacggctcctccgacctggagcttaaagacctcaccaaaaaggtggtgggggcgttgcctcaggggacctactggtatggaacttcccttgaaggtgcgaccgaacctggcgttaacgcatcatgcgcgtggcagcatcggggctagttttccgcgtttagtcagtt

SEQ ID NO: 2778 - protein, 126 aa, Corynebacterium glutamicum
MTTMREVSTDLNILIVPSEWEKVLENLPATLSESGFVASEIHSQIVDLTCEPDNMLVTQFSQLEGHPPIVEVLHRLVINGSSDLELKDLTKKVVGALPQGTYWYGTSLEGATEPGVNASCAWQHRG

SEQ ID NO: 2779 - DNA, 561 bp, Corynebacterium glutamicum
  CDS (101)..(538): RXA02540
gcatatgctgaagcagaaactaattcaggttttgatccccgcgctaactgggcgggccagaaccgctagacgttctctttgagaaaggaggtgacgaaacatggcatccacaccgaaaaaatccaacgatgaaggtcagtttgaccgtgtcgattttcaaggggaagtcttcgttatctctgtcgcagccgagcttgccggcatgcatgcccaaactttgcgaacctacgatcgcatgggtttggtcaccccgatacgcactcgcggaggcggtcgccgttactcccgcgctgacgtggaattactccgagaaattcagcacctcagccaggaggaaggcgtaaacctcgccggaatcaaggcgatcatcgagctcggcgaagaaaaccgaaacctcaaagaatccctgcgtaaggtcacagctgagaatgagcagctcaaagatcaattacgcagcgggcgtccgcgtggcgagctggtgcacgtgccccgctccaccgcggtggtcatgtgggaacgccgcaaggggcgttccaagtaaaaacatgcttgtcgacgcca

SEQ ID NO: 2780 - protein, 146 aa, Corynebacterium glutamicum
MASTPKKSNDEGQFDRVDFQGEVFVISVAAELAGMHAQTLRTYDRMGLVTPIRTRGGGRRYSRADVELLREIQHLSQEEGVNLAGIKAIIELGEENRNLKESLRKVTAENEQLKDQLRSGRPRGELVHVPRSTAVVMWERRKGRSK

SEQ ID NO: 2781 - DNA, 1551 bp, Corynebacterium glutamicum
  CDS (101)..(1528): RXA02544
ccaatcagggaagataagagctgttttcaacaggtcccactcaactttgacaccaagtctcacgcaaaattaacagccataaactttagaaggacaccctgtgtcccacacctgtggcatagtgatttttgtgagcacagaatcaggaaacaccccaaaaagggatgatgcaaaaagcaccatccctccgaaagatttgcctgacaccgtcttagacgcgattgaaggcaattttgagccaccgctaaatacccagaagtcggcggttccccctaatgccgaagcaactgtcgaggctgattctgaaggaactaccgaccgctctgtcattttgggcagggacggccgctggctgtccggatgggcattgcgcttcatcgtgctggttatcgccggcgtcattgcacttcgtatgctgggcttcatctgggttggcatcctcccagtcgtcctcgcacttctagtctgcaccgtgctatggccaccagtgaaatggctgcgcgagcataagattcccacggcgctcgccgttgtcatcacaattttgggtttcttcgccctcatcggcggagtttttgcagccatcgcgccaagcgtgtcttcccagacaaagcaagtggtagaccaagcaactgttggtatcgaagatctaatggattgggttcagggcccaccttttaacttagatatctcacagtttgaaggcgcgctcaatgacctaacatccatgctgcaatcacagtcttccaccattgcttctggtgtgttctctggactgtcaacggcatcatccatcgttgtcacactagcagtgatgctggtgttgaccttcttcttcctcaaagacggtcctcgtttcctgccatggatgcgcggcttcactggtgaaaacgcaggttggcacctcacagaagtcctgacccgtacctggaataccttggccggattcatccgtgctcaggcattggtgtccatggttgacgcaatattcattggtatcggattgctgcttcttggcgtcccaatggccctcgcgctcgcggtcatcacattcttcgcgggcttcatccccatcgtcggtgcggtgtctgcaggcgccctggctgtcatcatcgcgctagttaccaacggcgtgaccaatgcgcttttggtacttgtattgatcctggcggttcagcagatcgagggcaatatcttgtccccattcctgcagtccaaggctatgaacctgcacgcagcggttgttttgctatccgtcaccgtcggctccaccatgttcggcatcatcggcgcattcttggctgttccagtagccgcgacgttggctgtctgggtgcgctaccactctgaaatggttgctttgcgcgccggtgagatcaccagtgatgacattgagatcgccacgacgaaaggttccccaaccagcctcaatggccaagaaacccttgctgccattcgaagcagattcgccatccttggccgcaagaagccgacatctgccactgcagaaaaagcagactcagaaagctagccaataatgctcactcccga

SEQ ID NO: 2782 - protein, 476 aa, Corynebacterium glutamicum
VSHTCGIVIFVSTESGNTPKRDDAKSTIPPKDLPDTVLDAIEGNFEPPLNTQKSAVPPNAEATVEADSEGTTDRSVILGRDGRWLSGWALRFIVLVIAGVIALRMLGFIWVGILPVVLALLVCTVLWPPVKWLREHKIPTALAVVITILGFFALIGGVFAAIAPSVSSQTKQVVDQATVGIEDLMDWVQGPPFNLDISQFEGALNDLTSMLQSQSSTIASGVFSGLSTASSIVVTLAVMLVLTFFFLKDGPRFLPWMRGFTGENAGWHLTEVLTRTWNTLAGFIRAQALVSMVDAIFIGIGLLLLGVPMALALAVITFFAGFIPIVGAVSAGALAVIIALVTNGVTNALLVLVLILAVQQIEGNILSPFLQSKAMNLHAAVVLLSVTVGSTMFGIIGAFLAVPVAATLAVWVRYHSEMVALRAGEITSDDIEIATTKGSPTSLNGQETLAAIRSRFAILGRKKPTSATAEKADSES

SEQ ID NO: 2783 - DNA, 681 bp, Corynebacterium glutamicum
  CDS (101)..(658): RXA02545
aagaaatcgagaaagtaattcgtgggtgaagttgtttcagagttgttttttattaaacaactcagcctgtaacctcttggtcgttctatgcttggtcaccatgactgagactctttttgtatccgccacaactgaggaagcggtgtatcttccagatggaatcgacttgctggtgactggcatcggaacgaccgcagcaacgatgattttgactaaggagttggctactcgggaggtgcttcctgcccgaattgtcaatattggtacggcgggagctttggtggatggattggctggcgtatacgagatcgaatacgttctgcagcatgatttcagtagcgagttaatcgctgaaatgacaggaaagccatgctcaaatggttcaactttggccacgagtgggcacttcccagtagcgagtttggcaacaggaaactcatttattgcagattcagaaacccgcaaccacctggccacccgggcctccctctgcgatatggagggcgcggcgctggtgggcgtcgcaaagcattttggtgttccgattacgctgctgaagcaggttagtgacagcgcggatgaggaggcttcggggtcgtggtttgatgcggtcgatgcgggcgcacgacagttggcggaggctgtgaaggagtttaaataacaaaaacccgatgcctggcg

SEQ ID NO: 2784 - protein, 186 aa, Corynebacterium glutamicum
MTETLFVSATTEEAVYLPDGIDLLVTGIGTTAATMILTKELATREVLPARIVNIGTAGALVDGLAGVYEIEYVLQHDFSSELIAEMTGKPCSNGSTLATSGHFPVASLATGNSFIADSETRNHLATRASLCDMEGAALVGVAKHFGVPITLLKQVSDSADEEASGSWFDAVDAGARQLAEAVKEFK

SEQ ID NO: 2785 - DNA, 1227 bp, Corynebacterium glutamicum
  CDS (101)..(1204): RXA02546
gattatgtcggctccaccatcgtggtcagctacaccgaaaaaccaaacgcccagggcgcaattcagggcaattccagtttctctaggatcgagaaataacatgccattgtttatcgacgacgccctccaccgcagcaaaaaatacttccacgcgcacttaagcgagctgctcctcggcgaatttgcaggcctcagcctgcccctgcacccaccgacggcagctaaagccgccgccgatattgatgccacgagggaatttatccgccaatgggaggggcgtgatgatgtggaatatgccattcgaaactggtctcctgtgggcttaggtaaaactgaagtacccgttaggctgacgttgaacacgactgaggaattagttgtgtttgcgcaggtagaggatgaatggtcttcacttcacgagaggttttcacagctgtctggttttacagcggaggtggtggcgaaacatgtgtcgctgtggcgttcgctgtctaacgatgatctctctaaggcagtgttagttgtggattggtttttgaaacaccctaactctggcctgctgaaacgcgccgtcgcagttgaaggcgtgcataccaaatggctcgaaaaccaccgcgtactcattgaaacgttagtggccgacaaacgtggtgaacctggtcgtgccgatcttggacttggtgacgccgaagctcgcgtccggctccgcttccattccgtagatgctcccgctgggctcacagacattgaagtaccgctttccaacctgtgtgaattacaagaaccgcaagtaattctgatggtggaaaacctcgattcatttctcgctttacccacttggccgggcgtaacaattgcttggggtgcgggctaccgtgcagtagacattgttcgaggaccctacttttctaatggtcggttgctgtactggggtgaccttgacctggacggtttcaaaattctcgacggcgtccgcagccatgttcctcacaccgaatccgtgctgatgaactctgaaaccgtctcccgctggcgctaccttggcgttgccgaccgagaattcaaggcagagagctttgacaaccttcatgattttgaatctgacgcacttgacctactcattacagacggtgagctccgcattgaacaagaacgcatccgcctcgatgttgctgttgaagaaatcgagaaagtaattcgtgggtgaagttgtttcagagttgtttt

SEQ ID NO: 2786 - protein, 368 aa, Corynebacterium glutamicum
MPLFIDDALHRSKKYFHAHLSELLLGEFAGLSLPLHPPTAAKAAADIDATREFIRQWEGRDDVEYAIRNWSPVGLGKTEVPVRLTLNTTEELVVFAQVEDEWSSLHERFSQLSGFTAEVVAKHVSLWRSLSNDDLSKAVLVVDWFLKHPNSGLLKRAVAVEGVHTKWLENHRVLIETLVADKRGEPGRADLGLGDAEARVRLRFHSVDAPAGLTDIEVPLSNLCELQEPQVILMVENLDSFLALPTWPGVTIAWGAGYRAVDIVRGPYFSNGRLLYWGDLDLDGFKILDGVRSHVPHTESVLMNSETVSRWRYLGVADREFKAESFDNLHDFESDALDLLITDGELRIEQERIRLDVAVEEIEKVIRG

SEQ ID NO: 2787 - DNA, 1326 bp, Corynebacterium glutamicum
  CDS (1)..(1326): RXA02549
accctcactgcaatctcctccgaaacttggcctatcatgctcgcgccatgggtatgtctgcctctgctttcgcgaaatgtggatgcacgggccatcgcgttgtccttacttcccgcggcatgcatgggtgcagttaatgccaccgccacgatggcagcactcatcccggcagcgctgatcttgctgtatagagggctcttcttaaggctgcttctgtggggaatgggcgttctcgctgttaattcatggtggatcggacctttgttggtgcttggcaaatacgccccgcccttcaccgaattcatcgaaagttcctccgtcaccacttcctggctcaacccagtagaaatactccgcggaaccaccagttggacacccttcgtagacactgaacgacaagccggatatctcctggtcaacgatgctctctttgtcaccctcagcgttctcgtcgcagccctcggcttgatcggcctcaccttgatgaaacaccgtggactgtgggcattcatgctggccatcggactcctcatcctcggcagcgcccacctaacggctgttcaagaattcctcgacggcccaggcgcagcacttcgaaacatccacaaatttgatctattagtccgcatgccgttgatggtgggcgttgccgcattggggtcgcatatcagtctgcccttgcttgggacgactgcattgaccagcggacaaggcaaacaccacaccatcccgctgcctctccaaaaacgccaagccgcaggactcctcgtggtgatcatcgctgtcggtgctcttgctcccgcatggtcggcacggctgctacctcagggaacgtgggatgaagtgcctgactactggtacgaagccacagaattcctcaaccaaaacgccacaggcacccgcacgttgatttggcctagctcgccgtttgcccgccaggactggggatggactcgggatgaaccagctcaaccacttcttgatgttccgtgggctgtccgcgatgccattcctttggttcccccggaggcgattcgcggattagatggtctcgacgacctaggcactctaggcaccggtctaaacgacgaggctttaaaacgtctaggcatcggcgcagtactggtgaggcatgatctggaagccgacccagatattgaggtggatctgcctggggaaaagcacacttttggctcccaaggccaagtagacgtctacctcaccgaccccgaccgcaatatgtggatcacttccggcacatccaagcagctgcccaccgtcgctggcggcggcgaaatcctctcgctcctagacaccatcaacggc

SEQ ID NO: 2788 - protein, 442 aa, Corynebacterium glutamicum
TLTAISSETWPIMLAPWVCLPLLSRNVDARAIALSLLPAACMGAVNATATMAALIPAALILLYRGLFLRLLLWGMGVLAVNSWWIGPLLVLGKYAPPFTEFIESSSVTTSWLNPVEILRGTTSWTPFVDTERQAGYLLVNDALFVTLSVLVAALGLIGLTLMKHRGLWAFMLAIGLLILGSAHLTAVQEFLDGPGAALRNIHKFDLLVRMPLMVGVAALGSHISLPLLGTTALTSGQGKHHTIPLPLQKRQAAGLLVVIIAVGALAPAWSARLLPQGTWDEVPDYWYEATEFLNQNATGTRTLIWPSSPFARQDWGWTRDEPAQPLLDVPWAVRDAIPLVPPEAIRGLDGLDDLGTLGTGLNDEALKRLGIGAVLVRHDLEADPDIEVDLPGEKHTFGSQGQVDVYLTDPDRNMWITSGTSKQLPTVAGGGEILSLLDTING

SEQ ID NO: 2789 - DNA, 918 bp, Corynebacterium glutamicum
  CDS (101)..(895): RXA02552
tccttaaatacccactgtcctctattctgggttaggcttcactgggtaaaagtgcctgcctatgcctgaaacttgagcatggcaacagcaaggagacaccgtgggaaaacatgcagctgaaacatcggaaccgaagaaaaattcaccgtggcgcattggtttgttgacgtttttgatttcttcagttgtcgtgacgctggtgggcatggtgatgctgtggccggattctgatgatgtggtgttggcggataacttttcgcagacgtttgcgggaaatcatgagcaggtggatggaacgatcacgctcgttgataattctgcgtgtaattcgccagacaccggccgagtttttgcggaaagccccacgatttctgcggagccggcaacgttggagtgcgtgcgtgcactcgtagacatcacatcgggtgccaatgaggggcagaaaactcagctgatcacttacgcgcaacctggtgatccggagttttccgagggcgacaagatccgcatggtggaaacaccggatacaaatggcgagatcatctacacctttgctgattaccagcgcggaccggcgttgatcatttggggtgtggttctcattgtggcgatgggagctttcgcggcgtggcgaggtgtgcgtgcgctggttggtttggtcgtcaccttgggaattgttggtattttcttgctgccaggattggccagcgggcacgatgcgatgtggttggcgctggtgtgtggcgcggcgatcttgttgattgtggtgccgatggttcacggaatcaactggaaatcggcagctgcgttggcgggcacgctggtggcattgttgttgtcggcggtgttgtcgtgggcgtcgatcgtcaccactgaatttgcgcggactgggcgatgagaatcatctgaagatcatca

SEQ ID NO: 2790 - protein, 265 aa, Corynebacterium glutamicum
VGKHAAETSEPKKNSPWRIGLLTFLISSVVVTLVGMVMLWPDSDDVVLADNFSQTFAGNHEQVDGTITLVDNSACNSPDTGRVFAESPTISAEPATLECVRALVDITSGANEGQKTQLITYAQPGDPEFSEGDKIRMVETPDTNGEIIYTFADYQRGPALIIWGVVLIVAMGAFAAWRGVRALVGLVVTLGIVGIFLLPGLASGHDAMWLALVCGAAILLIVVPMVHGINWKSAAALAGTLVALLLSAVLSWASIVTTEFARTGR

SEQ ID NO: 2791 - DNA, 747 bp, Corynebacterium glutamicum
  CDS (101)..(724): RXA02554
gcttttgaagtgtgtcgcgtgtgcggactgaaatagtttccgcttcaacttggttgctaaggataggctccataaaaataaccaaaggcggaaaatttcaatgtcacacactaagccatccattgccatcctcggtgctggccgagtgggttcttcacttgccaggtcagcggtcgccgcaggctatgaggtaaaggttgctggttcaggtgctgtggacaaaatcgctcttaccgctgagatccttatgcccggcgcggttccaagcactgctgaccaggctgtaaaggatgcagatattgtgttcttggctgttcccctgcataaattccgcagtgtcaatccagccactttagagggcaagatcgttattgacacgatgaaccactgggttccggtcaatggtgagttggaggaaattgatcaggatccgcgcagcacttcggagattattgcggagtttttcgcgggatcaaccatggtgaagtcttttaaccacattggttatcacgagattgagcaggatgcgggtaccgggcgtgcgattgcgtatgccacggatgatgtggatgcaggtgcccaggttgcacagctaattaagagttttgggtttgttcctttaaatattggcgcattggaaaacggccgtattctggaacctggccaagaagctttcggcgcgcaccttaataaagattcgcgcctagaacttgttaatcagcggtagtacctcgatcttcagccaac

SEQ ID NO: 2792 - protein, 208 aa, Corynebacterium glutamicum
MSHTKPSIAILGAGRVGSSLARSAVAAGYEVKVAGSGAVDKIALTAEILMPGAVPSTADQAVKDADIVFLAVPLHKFRSVNPATLEGKIVIDTMNHWVPVNGELEEIDQDPRSTSEIIAEFFAGSTMVKSFNHIGYHEIEQDAGTGRAIAYATDDVDAGAQVAQLIKSFGFVPLNIGALENGRILEPGQEAFGAHLNKDSRLELVNQR

SEQ ID NO: 2793 - DNA, 854 bp, Corynebacterium glutamicum
  CDS (82)..(831): RXA02569
aatcttcaaatcgttcccgcaagcaaaaggtgacatactgctggcttgtttttgcattcgacgatctgcatggggattactatgtcacgctcatctaaaatttcggtcgcgtttggtggcctactcatcgctgctacctggctgtatttggtcttggtcaggcctaccgattgggaatcagtgggtggttccacggaagcgttgatcacgttggtgggctatgttgccggcacgatcgcgttgttggttggtgtgctgcctacgcttccagccaggaccattgcgatcattcctgtggctttggtgctcaatattttgttaggccaagtcactggttcttttgtcattccgctgtatttagatgcggtgggcacagtgctggtcgcagctcttgctggtcctagtgctggtttggcaacaggtgctttaagttctgtggtgtgggcgttgttcaatccgctggctttgccgtttgctgcaggttccgcgctgactggttggttgaccggtgtggtgattaaaaagggtgcgtttaagaatatcttcgccaccatcatctctggtgcggtcattggtttgatcacgggtgctgtcgctgccccggttgcggcgtttgtttatggcggaaccgccggtgtgggaactggtgcggtggttagcctcttccgcgaaatgggtaactctttgctcgcatcggtaacctggcagtcgtttatttccgatcctttggataaggccattgttatgctcattgtgtttgtggtggtcaagtcgctacccaagcgcaccactagggcattggttccgcagcgggttccggaggacgtcgcttaaacatgaatcctttgacatgg

SEQ ID NO: 2794 - protein, 250 aa, Corynebacterium glutamicum
MSRSSKISVAFGGLLIAATWLYLVLVRPTDWESVGGSTEALITLVGYVAGTIALLVGVLPTLPARTIAIIPVALVLNILLGQVTGSFVIPLYLDAVGTVLVAALAGPSAGLATGALSSVVWALFNPLALPFAAGSALTGWLTGVVIKKGAFKNIFATIISGAVIGLITGAVAAPVAAFVYGGTAGVGTGAVVSLFREMGNSLLASVTWQSFISDPLDKAIVMLIVFVVVKSLPKRTTRALVPQRVPEDVA

SEQ ID NO: 2795 - DNA, 765 bp, Corynebacterium glutamicum
  CDS (101)..(742): RXA02570
ccattgttatgctcattgtgtttgtggtggtcaagtcgctacccaagcgcaccactagggcattggttccgcagcgggttccggaggacgtcgcttaaacatgaatcctttgacatggatcattggcgcattcagcatgtggatcgtggtgctgggcgttaataagcttggtttaagcatcgcagtgatcatcatcgcgcaggtcgtggcgatgattcgggtgcgcaatgtatctgtgttggcttcaacagcattgttatcggttcctgcattggcctcgatggcgctgattcacatgccgtattcttccgacggctggttgattgctcttaccttgacggctcgttttagtgcgttgatgtctattttcctccttgcagcaacagcgattactattcctgagctggtgaaatccctatatcgttggcccaagctggcgtatatcgtgggttctgcattgcagatgattccgcagggtaaacagaccttggcgttggttcgtgatgccaatgctttgcgcgggcgcagcgttaaaggtcccgtgcgcgcggtgaaatatgtgggtttgcccctgattacacatttacttagtgcaggtgccgcgcgagcgattcccttggaggtcgcaggcctggacaggccggggccgcgtacggtgttggttgaggtggtggaggggcgcgtcgaaaagcattgtcgctggttgttgccgcttttggcagtcgggatggcgtggtggctctaactcaaatcgtcggaccgtcc

SEQ ID NO: 2796 - protein, 214 aa, Corynebacterium glutamicum
MNPLTWIIGAFSMWIVVLGVNKLGLSIAVIIIAQVVAMIRVRNVSVLASTALLSVPALASMALIHMPYSSDGWLIALTLTARFSALMSIFLLAATAITIPELVKSLYRWPKLAYIVGSALQMIPQGKQTLALVRDANALRGRSVKGPVRAVKYVGLPLITHLLSAGAARAIPLEVAGLDRPGPRTVLVEVVEGRVEKHCRWLLPLLAVGMAWWL

SEQ ID NO: 2797 - DNA, 567 bp, Corynebacterium glutamicum
  CDS (101)..(544): RXA02573
cttccacacggctctaactataggaaaagacggcagcaaagcattaatcgtcggtaggctgaagtgaagtactttccgaaagattcacagggagcatgcaatgacgaacaaaaccatgctggttgcttttgatggctcaccggaatcccggcgcgctttggaatatgcggcgaaattgttgcagccgcgcaccgtggaaattttaactgcgtgggagccattgcatcggcaagctgcgcgctcggtttcgttgatcaccttgggggtggaacccgaagaccccgcccattccgctgcactaaaaacctgccaggaaggcgtagagctagcccaatctctaggtctggaagcgcgagcccacatggtggaatccgcaacggccgtgtggagcgccatcgttgatgctgctgacgagctccgccccgacgtgattgtcaccggcacccgcgggatctccggatggaaatccctgtggcaatcctccacctcagacagcgtgctccaccacgccgacgtaccagtttttgtcgttccacccctggactaaaaccgagacgagaaccaaga

SEQ ID NO: 2798 - protein, 148 aa, Corynebacterium glutamicum
MTNKTMLVAFDGSPESRRALEYAAKLLQPRTVEILTAWEPLHRQAARSVSLITLGVEPEDPAHSAALKTCQEGVELAQSLGLEARAHMVESATAVWSAIVDAADELRPDVIVTGTRGISGWKSLWQSSTSDSVLHHADVPVFVVPPLD

SEQ ID NO: 2799 - DNA, 1258 bp, Corynebacterium glutamicum
  CDS (101)..(1258): RXA02575
ccaattgctctacatcacacgtctcgaacaaaagtgaagttaccagtccgtaaccccttctgagtaggaatttcgcatcagtgcaactagcctttcaggtgtgaagaactctgggaaaaattcggcaaagaatcggaccaaagggatcctaatcggggttctcgttggtctgattgccatttttgcaggcatctatgcggtcgatgttttcctcaacaaggacaacatccctcgtggaacaaccgtcggtggcgtcagtatttccaacctcagtgcacaagaagcccgcacaaagttggaaaccgaactggccaatgatgtggtgcagcccgtcaccgtgacggcaggggagcagagcaccacttttgatccagttgcctccggcgtcggcatcgattgggacgcaaccatcgaaggcaccggcgagcagtcttggaaccccattacccgcttcgtggcgctgttcaaagaatccgaatctcccatcgtgagcaccgtcgatcccgcagccttcggcccgacccttgatcgcatggtcggcgaactctatcgagatcccatttccggaaacctgcatatcgacgccggcaccctcgtggtcaacgacaccatcgacggacaagccgtagaccgcaccattttggaacaagcagtcacagaaaactggctcaacccagagggcgtaaaagccgagccatacgttgttcccgctgcgatcagccaagacaccatcgataaacttgcagaaggcgccggagctaaagcagtatctagccctttcgtcgtccgaggcgatgacggaattgaaggcaccatccccgtcgagcgcatgggtgaagtggtgagtttcccagaagaaaacggcaccatccgcgtcgacatcaatgcagaagcagcaacagcaatgctggccgaaggtctcaaagaaacagagatcgagcccaccaacgctcaaatcagtttctcctcaggctcccgcgtagtcaccccagaagtcaccggacacggaatcaactgggaagaaaccctggccgatctgcccaacaacctcaccggcgatggcccccgcaccatcgacgcaatctacgaggacaccccagcaacattcaccgccaccgacgcccaaaacgctaccttcaatgaggtcatgggcgagttcaccaccggcggcttctctgctgcctccggaacaaacatccgcctcaccgcgcaaatggtcgacggcgcagtcgtttcacctggcgatacattctccctc

SEQ ID NO: 2800 - protein, 386 aa, Corynebacterium glutamicum
VKNSGKNSAKNRTKGILIGVLVGLIAIFAGIYAVDVFLNKDNIPRGTTVGGVSISNLSAQEARTKLETELANDVVQPVTVTAGEQSTTFDPVASGVGIDWDATIEGTGEQSWNPITRFVALFKESESPIVSTVDPAAFGPTLDRMVGELYRDPISGNLHIDAGTLVVNDTIDGQAVDRTILEQAVTENWLNPEGVKAEPYVVPAAISQDTIDKLAEGAGAKAVSSPFVVRGDDGIEGTIPVERMGEVVSFPEENGTIRVDINAEAATAMLAEGLKETEIEPTNAQISFSSGSRVVTPEVTGHGINWEETLADLPNNLTGDGPRTIDAIYEDTPATFTATDAQNATFNEVMGEFTTGGFSAASGTNIRLTAQMVDGAVVSPGDTFSL

SEQ ID NO: 2801 - DNA, 1545 bp, Corynebacterium glutamicum
  CDS (101)..(1522): RXA02576
cttaggcctgtcgttgcttgcgattggtgtgttcctcacgggaattttcaagcgcggccagctgatgagcactgtgaataaactcaggagttaaatccttatgaccccgacccgccgtatcctgctgtgggcatggacgactgtgcttttgggttctttgctgtggccgttggctgcgcctggcgagttgttgttgcgggatatgtcggtggtggaccatcctgcgttgtcgttgaatgcgttgggttttggtgatttgccgtcgcggaacgccccgcaggatggtgtgctggcgttgcttggctttttgccggtgagttggatcgttcgaaccatgctgcttgtggcgggtttcgcgggcgcgtggggtgcgatgcgccttgggccttccaagtttttggccgttaccgtggcgatttacaatcccttcgtggtggagcgtctgctgcagggccattggtcgttggtgatggcggtgtggctgttcccgctggttgtggcgctgcgcaggcatccgcgttggcaggttgtggcgatctgggcggcgtcgttgacgcccacgggtgcggtggttgcggcggtcacgggcgtggcgagttctaaaagaaaacgctttacgacgctatgttccttcctttcgtggcttccttggctaatacctgcgcttcttgccacccccacttcgggaggtgcgctgaccttcgccattcgttctgaaacatatgcaggaacgttgggaactgcgctgggcctgggtggaatttggaacgcgggggccgtgccggcctcacgcgaactgggtttcgcggttgctggaattttgttatttgcgattctgctggcgggtttcaaaaactgtccgtgggttctcgcactgctggcggtcgtaggttttatgggggcgatcggtccgtggctgatgccgaatctgttcacgtggaccatcgcatatgttccaggcgccgcgctgtttagggattctcaaaaactcctcatgctggctatccctgcctatgtgtgtttggccgccggggtgaaaagcccactgtcgtgggtggctaccggtttggcgttgctccagattcctgatgcaccacgtgaggtttccgtgatacgcccaagttcagcgcatgtggaatcagtggaagcactggcagaaatcgctgatggccgcgacatcttaatcatcggccaaggccccttggtgacccgcgaggatgggatcccggttgtcgatcccaaaaccaaagccctctccgtggtggaatccggcgaactgcgtgtggacggaatcatcaccgacgcgccctcacagcggtggaccgaagcaacgcaggcatgggcggccggggatatcgagcgccttgaagaacttggcgttggtgtcgtggtggatggagatacgatcacagaaactggcgcaccaccgcagcatggctggaaatactacctcggtgtgggcctgaccgtgctgtggatggcgttgccgctgggactactttttcgacgcaagaccaagaagtagttcctcgaactgcgctcccg

SEQ ID NO: 2802 - protein, 474 aa, Corynebacterium glutamicum
MTPTRRILLWAWTTVLLGSLLWPLAAPGELLLRDMSVVDHPALSLNALGFGDLPSRNAPQDGVLALLGFLPVSWIVRTMLLVAGFAGAWGAMRLGPSKFLAVTVAIYNPFVVERLLQGHWSLVMAVWLFPLVVALRRHPRWQVVAIWAASLTPTGAVVAAVTGVASSKRKRFTTLCSFLSWLPWLIPALLATPTSGGALTFAIRSETYAGTLGTALGLGGIWNAGAVPASRELGFAVAGILLFAILLAGFKNCPWVLALLAVVGFMGAIGPWLMPNLFTWTIAYVPGAALFRDSQKLLMLAIPAYVCLAAGVKSPLSWVATGLALLQIPDAPREVSVIRPSSAHVESVEALAEIADGRDILIIGQGPLVTREDGIPVVDPKTKALSVVESGELRVDGIITDAPSQRWTEATQAWAAGDIERLEELGVGVVVDGDTITETGAPPQHGWKYYLGVGLTVLWMALPLGLLFRRKTKK

SEQ ID NO: 2803 - DNA, 1008 bp, Corynebacterium glutamicum
  CDS (101)..(985): RXA02577
ggggtcgacggaggtttggaatgcaacgtgggtcgccaagactcccagggaggcgattgcgcgtagtccctcgagtgagctgatgaatccgcgatggcggatgggtgcatatgattgggtagacattatttcaacatgcgagtttagcggaaaggtgtgggctgtttttatgaagcgatctgcaacggtcctcattattgcgggcgtgctgttcctcatttttgccttcacggtaccgccgtatgtgactggtcaggcgcggacgattccgaaggatttggatctgacgttggtgagcgaaagtccgcaggggtttgtgcgcactgaacatattgtgactgctccgacggaaaaggtcgatgagatcgcgacgcatgtggatcagacagttacggatgtgcaggggaaaactgttgcggaaatttcggatgatgtggtgttgattggacactctcgttatccggtgattaagccgactgccaccatttcgggttcgccggcggatagtagcaatgtggtgcgggaggggttgcattacttcttcccggctaatacgttgcggaattcttatccctattatgacatcgtattgggtgaggattccccggtggattatgtctcgcgcgagggcaatacttataccttctaccagcatcttcgttatgttccattggatgattctcacacctattcggtggagcggaccctgaaagtggatcgtttttccggcatcattgtggctaaagatgaggcgatgacgtttcatggcccagacggcgatgacacagtagaattcacttatactgcggatacgttgaagcttctgcaggatcatgcgcatgatattgatcagcggttgtcgtgggctaaggggtttgatttcttttctaaattcttaggcctgtcgttgcttgcgattggtgtgttcctcacgggaattttcaagcgcggccagctgatgagcactgtgaataaactcaggagttaaatccttatgaccccgacccg

SEQ ID NO: 2804 - protein, 295 aa, Corynebacterium glutamicum
MGAYDWVDIISTCEFSGKVWAVFMKRSATVLIIAGVLFLIFAFTVPPYVTGQARTIPKDLDLTLVSESPQGFVRTEHIVTAPTEKVDEIATHVDQTVTDVQGKTVAEISDDVVLIGHSRYPVIKPTATISGSPADSSNVVREGLHYFFPANTLRNSYPYYDIVLGEDSPVDYVSREGNTYTFYQHLRYVPLDDSHTYSVERTLKVDRFSGIIVAKDEAMTFHGPDGDDTVEFTYTADTLKLLQDHAHDIDQRLSWAKGFDFFSKFLGLSLLAIGVFLTGIFKRGQLMSTVNKLRS

SEQ ID NO: 2805 - DNA, 474 bp, Corynebacterium glutamicum
  CDS (101)..(451): RXA02584
gactcaaggccaatgaatccctggatgtggaacaggatacgattaactcagactctaaccgacagtccgcaattgaaaggccagatacgtgaaccgctggatgtccttgctgtgtgattccatcgccatcggtctcttcgcactcttcgcccgcgtcgcccaccaaagcgccgacatgccactaaatgtgcagggctggtttttcacatggctgccattcctcgcaggtgtgttcatcgcctacctggtggcaatcctccctgcgaagcttcccagcgaacgcatccgccccgctggcctgaccgtgtggatactcgcggtaattgtgggacttgtgatttggggcttcaacaatggtggggttccacactggtccttcatgattgtcgcaacgaccgcctccgccattttggttctcggctggcgagcgttgtttaaggtgacaatgcgctaagtgcttttaaaaaatgggag

SEQ ID NO: 2806 - protein, 117 aa, Corynebacterium glutamicum
MSLLCDSIAIGLFALFARVAHQSADMPLNVQGWFFTWLPFLAGVFIAYLVAILPAKLPSERIRPAGLTVWILAVIVGLVIWGFNNGGVPHWSFMIVATTASAILVLGWRALFKVTMR

SEQ ID NO: 2807 - DNA, 1104 bp, Corynebacterium glutamicum
  CDS (101)..(1081): RXA02585
gcgaggatttttcagcaacccctggattcgttgggctttgtccctggcgtttctaggggtgatcctatttttcctgagggatcagctggatttcctcaaaatgggcatccaacaaatccgccacgtcagccccgtaggcgttgccctcaccatggtggcgttggtgttgtcattcgttgcgatggccagagtcatgcagatcatgttgaaagccggaggtagtcctgcgactctcaaagccaccacggctttaacttttgcggctaactcctggtccgcgacccttcctggcggcccggcgttttccgcgattctcacctataaagtgcagcgcagctggggtgccagcgccgtgctgtgttcgtggtttttcctgctctccagtgccctatcgaccgtctggttggttgctctcggtgtcatcgccgtgttttatatgggcgcatcgctgaacttatggtcactgatcgccacattcatcgccatggtcgggctgtctggcgccgtttattgggcagccaacaaccccgactccttggctcggtgggtgcgaaaattgacgaaaaacagggagtggggcttcgtcgaaaagcttcttggaagcattgagcagctgcgctcggtctcgctcaccgggccgcaattcgcggccagcaccgcgtggtctttaggcaataggcttttcgacgccatctccctctggatttgcatctgggcggtcaccggcactgccccgatgtttgaaccagaacccaacaacaccaccatcgcaggcgtactgttggcgtacaccaccgcaaaaatcgcaggctcaatccaagccaccccaggcggaatcggccccatcgaagccgcctacatcgcagccctcgtagccaccggtatgaccgcagtggaagccgccggagctgtcataatctaccgtttatgctcatttatcatcatggcgattgtcggatgggtcatctattttatctatttcaccccccagggactcaaggccaatgaatccctggatgtggaacaggatacgattaactcagactctaaccgacagtccgcaattgaaaggccagatacgtgaaccgctggatgtccttgctg

SEQ ID NO: 2808 - protein, 327 aa, Corynebacterium glutamicum
MGIQQIRHVSPVGVALTMVALVLSFVAMARVMQIMLKAGGSPATLKATTALTFAANSWSATLPGGPAFSAILTYKVQRSWGASAVLCSWFFLLSSALSTVWLVALGVIAVFYMGASLNLWSLIATFIAMVGLSGAVYWAANNPDSLARWVRKLTKNREWGFVEKLLGSIEQLRSVSLTGPQFAASTAWSLGNRLFDAISLWICIWAVTGTAPMFEPEPNNTTIAGVLLAYTTAKIAGSIQATPGGIGPIEAAYIAALVATGMTAVEAAGAVIIYRLCSFIIMAIVGWVIYFIYFTPQGLKANESLDVEQDTINSDSNRQSAIERPDT

SEQ ID NO: 2809 - DNA, 807 bp, Corynebacterium glutamicum
  CDS (101)..(784): RXA02588
ctcagctgactgaccgtcaggtcatcaccaagtttgaaggcaaaggcttggaaaaagatcacgtgatcaatgagtacttgtggcagaaggtgcaaaactaatgtctgatgtgcatgaggtcattcatagctacaatcccactgacaaagaaggccctgaaagtgtccttctagtgtgggacgctcccaacctagatatgggtttgggcgctattttgggtggtcgcccaaccgctgcgtaccgacctcgctttgatgccatcggtcggtggttgcttgctcgcgcaggtcgcagggcacatgagttgggccgccacattgagcctgaggcaacggtgtttgccaacatcaccccaggtggctctgatgttgttcgaccttgggtggaagcgctgcgtaacgttggtttcgcggtcttcgctaagcctaagatcggcgaggattccgatgtcgatccggacatgattgatcacattcgcaggcgctatgaagaaggcgtgctgcggggtgtcatcgtggccagtgcagatggtcagaacttccgtgagactctcgaggagctcgttgcagagggcattcctgccacggtcattggtttccacgagcacgcgtcatgggctgtagctcatgacaccatcgagtttgttgatctggaggaaatccccggcgtcttccgtgagccgcttcctcgcgtcagcctggataacctgccagacggtggcgcatggctgcagccgttccgccctctgactgccttgttatccaaccgccacaattcccaggagtaatccacccgtgttttctaaat

SEQ ID NO: 2810 - protein, 228 aa, Corynebacterium glutamicum
MSDVHEVIHSYNPTDKEGPESVLLVWDAPNLDMGLGAILGGRPTAAYRPRFDAIGRWLLARAGRRAHELGRHIEPEATVFANITPGGSDVVRPWVEALRNVGFAVFAKPKIGEDSDVDPDMIDHIRRRYEEGVLRGVIVASADGQNFRETLEELVAEGIPATVIGFHEHASWAVAHDTIEFVDLEEIPGVFREPLPRVSLDNLPDGGAWLQPFRPLTALLSNRHNSQE

SEQ ID NO: 2811 - DNA, 1953 bp, Corynebacterium glutamicum
  CDS (101)..(1930): RXA02591
atgtgtccgttgtctcacctaaagttttaactagttctgtatctgaaagctacgctagggggcgagaactctgtcgaatgacacaaaatctggagaagtaatgactactgctgcaatcaggggccttcagggcgaggcgccgaccaagaataaggaactgctgaactggatcgcagacgccgtcgagctcttccagcctgaggctgttgtgttcgttgatggatcccaggctgagtgggatcgcatggcggaggatcttgttgaagccggtaccctcatcaagctcaacgaggaaaagcgtccgaacagctacctagctcgttccaacccatctgacgttgcgcgcgttgagtcccgcaccttcatctgctccgagaaggaagaagatgctggcccaaccaacaactgggctccaccacaggcaatgaaggacgaaatgtccaagcattacgctggttccatgaaggggcgcaccatgtacgtcgtgcctttctgcatgggtccaatcagcgatccggaccctaagcttggtgtgcagctcactgactccgagtacgttgtcatgtccatgcgcatcatgacccgcatgggtattgaagcgctggacaagatcggcgcgaacggcagcttcgtcaggtgcctccactccgttggtgctcctttggagccaggccaggaagacgttgcatggccttgcaacgacaccaagtacatcacccagttcccagagaccaaggaaatttggtcctacggttccggctacggcggaaacgcaatcctggcaaagaagtgctacgcactgcgtatcgcatctgtcatggctcgcgaagaaggatggatggctgagcacatgctcatcctgaagctgatcaacccagagggcaaggcgtaccacatcgcagcagcattcccatctgcttgtggcaagaccaacctcgccatgatcactccaaccatcccaggctggaccgctcaggttgttggcgacgacatcgcttggctgaagctgcgcgaggacggcctctacgcagttaacccagaaaatggtttcttcggtgttgctccaggcaccaactacgcatccaacccaatcgcgatgaagaccatggaaccaggcaacaccctgttcaccaacgtggcactcaccgacgacggcgacatctggtgggaaggcatggacggcgacgccccagctcacctcattgactggatgggcaacgactggaccccagagtccgacgaaaacgctgctcaccctaactcccgttactgcgtagcaatcgaccagtccccagcagcagcacctgagttcaacgactgggaaggcgtcaagatcgacgcaatcctcttcggtggacgtcgcgcagacaccgtcccactggttacccagacctacgactgggagcacggcaccatggttggtgcactgctcgcatccggtcagaccgcagcttccgcagaagcaaaggtcggcacactccgccacgacccaatggcaatgctcccattcattggctacaacgctggtgaatacctgcagaactggattgacatgggtaacaagggtggcgacaagatgccatccatcttcctggtcaactggttccgccgtggcgaagatggacgcttcctgtggcctggcttcggcgacaactctcgcgttctgaagtgggtcatcgaccgcatcgaaggccacgttggcgcagacgagaccgttgttggacacaccgctaaggccgaagacctcgacctcgacggcctcgacaccccaattgaggatgtcaaggaagcactgaccgctcctgcagagcagtgggcaaacgacgttgaagacaacgccgagtacctcactttcctcggaccacgtgttcctgcagaggttcacagccagttcgatgctctgaaggcccgcatttcagcagctcacgcttaaagttcacgcttaagaactgc

SEQ ID NO: 2812 - protein, 610 aa, Corynebacterium glutamicum
MTTAAIRGLQGEAPTKNKELLNWIADAVELFQPEAVVFVDGSQAEWDRMAEDLVEAGTLIKLNEEKRPNSYLARSNPSDVARVESRTFICSEKEEDAGPTNNWAPPQAMKDEMSKHYAGSMKGRTMYVVPFCMGPISDPDPKLGVQLTDSEYVVMSMRIMTRMGIEALDKIGANGSFVRCLHSVGAPLEPGQEDVAWPCNDTKYITQFPETKEIWSYGSGYGGNAILAKKCYALRIASVMAREEGWMAEHMLILKLINPEGKAYHIAAAFPSACGKTNLAMITPTIPGWTAQVVGDDIAWLKLREDGLYAVNPENGFFGVAPGTNYASNPIAMKTMEPGNTLFTNVALTDDGDIWWEGMDGDAPAHLIDWMGNDWTPESDENAAHPNSRYCVAIDQSPAAAPEFNDWEGVKIDAILFGGRRADTVPLVTQTYDWEHGTMVGALLASGQTAASAEAKVGTLRHDPMAMLPFIGYNAGEYLQNWIDMGNKGGDKMPSIFLVNWFRRGEDGRFLWPGFGDNSRVLKWVIDRIEGHVGADETVVGHTAKAEDLDLDGLDTPIEDVKEALTAPAEQWANDVEDNAEYLTFLGPRVPAEVHSQFDALKARISAAHA

SEQ ID NO: 2813 - DNA, 714 bp, Corynebacterium glutamicum
  CDS (101)..(691): RXA02598
ctttgggaaagtaccccctatgacggaaaactggatggatcctgtggttgaaccacagtcaacgggagaggggaaatcggacactatatggttggagatcgtgacaactgaccaaaacaaaagaagtctcagtgagcttgcggccagaatcgttagtgaaatctgtgcaccgtgggtactcaacatcggatttttcctcatcctgggcggcgtaacaggcgcctggacgctaggaattgtggcggcaatcggaaccggaatcgttccgatgatcttaattttgggcttgatgaagctcggcagggtaggaaaccaccatgtgacgacccgaaatcagcgcggccttgtgtttgtgggcatcattgtttgtgtcatcattttgatttttatcctcagagcccttgaagcacctcagctgatttgggatggcatgttctcagcactgattttcttagttctgtttgcacaagtgacgttgaaaattaaagcctcagttcatgttgggctgtgggtgtgtttagtgatgttcctcggtctgacggtttcttcgtggtggttactcgggttgctgtttaccccagtcaccgcgtgggcacgtatgcggatcaagcatcatacgatgtcggagattgtggcgggcgttgttacaggagcagttgcaaccggcatttgttatgcactcctacttgcgtaaaggagaattatggatcagct

SEQ ID NO: 2814 - protein, 197 aa, Corynebacterium glutamicum
VTTDQNKRSLSELAARIVSEICAPWVLNIGFFLILGGVTGAWTLGIVAAIGTGIVPMILILGLMKLGRVGNHHVTTRNQRGLVFVGIIVCVIILIFILRALEAPQLIWDGMFSALIFLVLFAQVTLKIKASVHVGLWVCLVMFLGLTVSSWWLLGLLFTPVTAWARMRIKHHTMSEIVAGVVTGAVATGICYALLLA

SEQ ID NO: 2815 - DNA, 1521 bp, Corynebacterium glutamicum
  CDS (101)..(1498): RXA02600
gattttgcttttcgacgcaccgttcggccgttatctagatctggtcacaatgtcggtttttcatggattcatgtcctttatcggacgtactgtggggagtatgcaaccttttccactgtccttaaccaacagctccgtcgctggtattgcagcgggagcgttgctgtttctctccgtccctttcgcatcgcctgttcacgcgcaaaccatactgcaagacacccttgaagtgactgtgttggataatgccgacgagctcgctccagaggatgaggatttcctcagcacggaaacacccaagattgatttccctgactcagttaccgcagtccggtacatcacgctcacggacaacactgacaaaatcaatgatgacgttgaaaattacctgcgcgccgaacaccccgagtggatccaaacaaactctttcgcccctggtgaagtgatcatcgcagtcggtttcgaccccaacaccatgggtgcctacgcgggtaacgatgtggccgcagagactgggatcgcagaacaagaccgcatcgacggcaccaccgatgcgatgcgcccattactccaagacggtcgcattgccctaggcatgttggagggtgcaaaatcggttgctgatacctctgtcgttcgggaaagctcagctccaagtggtggagtaatcgccgctattttgggtggcatcgctgctctcgtggcaattattgtcgcgtgggctacgagttacgcgaataagaagaaggcagaaaaggctcgtgagcagtttgattatgcatcacgccattatggtgaggtcgcccagcaactcgacggtatcaacgtgcgagcgcactcgctaacttccccactggctgatgatgagctccgcaggcaatgggacgatgtaaattctcgttttcttgaagtcaatgatatttttggcaggctcgaaggtttgacctcgacctcagaaaacaaggcatttcgaaaagccttgccagatattgaaaaagctcatactgccgtgactcaaatggagatcgcacagaaaaacattgacacgctctacgatatggagcacggccatgaagacacccgtcgcagggaattaactaggctgcgtgccgatatgcaggaagcccgtcaagatatcaacgataaagatgcagttgttgacgatattctccgcacgctgatccagcgcacggaaactatcgcaccgtccgcacctgatttcatggaccaatacgcccgcttgatccgtgattatgccgtggcgcttcaaggtgtggaaaagaacctcgagcaggttaaacagaccaccgagcgcaatgctccagccatctacgacgacaattggcgcgtgggcactggctacaactcgtgggtcccgtactacatgatcagttcttggcacgcagctgatgtcagtgctgcatcgtcagcttcttccagttcagcaaataccactttcagcagtggtttcagcggcgctggaggaggttccagctggtaaacaccaccactgaagtcaac

SEQ ID NO: 2816 - protein, 466 aa, Corynebacterium glutamicum
MQPFPLSLTNSSVAGIAAGALLFLSVPFASPVHAQTILQDTLEVTVLDNADELAPEDEDFLSTETPKIDFPDSVTAVRYITLTDNTDKINDDVENYLRAEHPEWIQTNSFAPGEVIIAVGFDPNTMGAYAGNDVAAETGIAEQDRIDGTTDAMRPLLQDGRIALGMLEGAKSVADTSVVRESSAPSGGVIAAILGGIAALVAIIVAWATSYANKKKAEKAREQFDYASRHYGEVAQQLDGINVRAHSLTSPLADDELRRQWDDVNSRFLEVNDIFGRLEGLTSTSENKAFRKALPDIEKAHTAVTQMEIAQKNIDTLYDMEHGHEDTRRRELTRLRADMQEARQDINDKDAVVDDILRTLIQRTETIAPSAPDFMDQYARLIRDYAVALQGVEKNLEQVKQTTERNAPAIYDDNWRVGTGYNSWVPYYMISSWHAADVSAASSASSSSANTTFSSGFSGAGGGSSW

SEQ ID NO: 2817 - DNA, 2112 bp, Corynebacterium glutamicum
  CDS (101)..(2089): RXA02601
ctcatacaattgccaggatcttccatggcggatacggcgcgtaagttctgtgaatgcggggtccggatactacgcttaggcaagataaattgtgagttcaatgaagggtgaagatacgtcaatgagcgcaacaaacctggcggttgagcagctacagcgagtgctcctgccgaggcgcggcgagccagcagatgtcaggtcgttgtacctgttggaagcagaaagtaataaggaacgcctggaatgggaagatcgttttagcgtttccgtccccgctggcgccgaggtgtcttttcagacctacttcaatgcatttcctgcaagctactggcgtcgctggtcacagctagattctgtcgtactgaaactgaaagtttccggcgaagcgcgcgtcgacctctaccgatccaagatcgatggagcacgcatcggaattaccggttccgtagtcaaagatgacttcatcgaatttgaagtttcattagccccattcgaagacggcggctggatctggttcgacctcaccgctgaaaccgacgcaaccgtcgaagaagcaggctggtacgctccacacgcgccaaaagcccagatcatgccagatggatctgaagtcggcccatttgaagcccgtgcaaccgtcggaatcccgaccttcaaccgcccagctgatgcagttgcagcactggaagcacttgcctccgacccagcagttgacgccgtcattgataccgtcatcatgcctgatcaaggcaacaagcaccctgccgacgagccaggttacaaggcagctgttgagcacttcggcgaccgcttcttcgaattccgccagggcaacctcggcggatccggcggttactcccgcatcatgttcgaagcccttggcggagtcgacggcaagggcgaagcaggcgctgccaagagcccatacatcctgtacatggatgacgacattgctattgagccagactcagtgctgcgtgcgcttcaggtagcccgctacgcaaaatcccccatcctcgttggcggacaaatgctcaacctgcaagagcgcagccaccttcacaccatgggcgaagtagttggcggacacgacttcatgtggaccgccgcaccacacgtgcactacgaccacgacttctctgcacacccactacatgatcgcggtaaattcgacgacaagccagacgcaccaaactcccgcgacctgcaccgccgcatcgacgttgacttcaacggctggtggatgtgcatgatcccacgcgttgtcgccgaacagatcggccaaccactcccactctttatcaagtgggacgacgccgaatacggtctacgcgcacgcaaagctggattccccacagcaacctggccaggaatcgcaatctggcacatggcctggtccgacaaagacgacgccatcgactggcaggcctacttccacctccgcaaccgcctcgtggttgccgcgatgtaccaccaaggcagcgtcgacggcattgtccgatcgatgcaaaaagccaccttcaagcacctgctgtgcctggaatactccaccgtggcaatccaaaacgaagcaatgaaggacttccttgcaggaccagatcagctcttctcgatcctggacacctcactacctcgaattgcagcgattcgcaaaacctatccagacgccgttgtgctgccaagcgccaccgaactgccacgagcaaccggcgcgccgggtgtcccaaccaaggacatcggtggacgcctggccccaatcaagaaggcaatgtggctggctaagggcctgaagcactccctgtctaaggaagatgcctcccaccacgaggtgccacaggccaacttcgcaccaatcgaagcacgttggttcagcctgtcccgagtcgatggcgcaacagttaccaccgcggatggccgcggcgtggtctaccgcaagcgcgaccgcgacaaagctaaagaacttggcaaagaagcacgcgcactgcaaaagcaagtagcagagcgtttcgacgaactcagtcgcgcctaccgcaacgctcatcctgagcttgtgagccgtgaagcctggggaaaggtcttcgatgagcaataaggaagtacagattctggtag

SEQ ID NO: 2818 - protein, 663 aa, Corynebacterium glutamicum
MKGEDTSMSATNLAVEQLQRVLLPRRGEPADVRSLYLLEAESNKERLEWEDRFSVSVPAGAEVSFQTYFNAFPASYWRRWSQLDSVVLKLKVSGEARVDLYRSKIDGARIGITGSVVKDDFIEFEVSLAPFEDGGWIWFDLTAETDATVEEAGWYAPHAPKAQIMPDGSEVGPFEARATVGIPTFNRPADAVAALEALASDPAVDAVIDTVIMPDQGNKHPADEPGYKAAVEHFGDRFFEFRQGNLGGSGGYSRIMFEALGGVDGKGEAGAAKSPYILYMDDDIAIEPDSVLRALQVARYAKSPILVGGQMLNLQERSHLHTMGEVVGGHDFMWTAAPHVHYDHDFSAHPLHDRGKFDDKPDAPNSRDLHRRIDVDFNGWWMCMIPRVVAEQIGQPLPLFIKWDDAEYGLRARKAGFPTATWPGIAIWHMAWSDKDDAIDWQAYFHLRNRLVVAAMYHQGSVDGIVRSMQKATFKHLLCLEYSTVAIQNEAMKDFLAGPDQLFSILDTSLPRIAAIRKTYPDAVVLPSATELPRATGAPGVPTKDIGGRLAPIKKAMWLAKGLKHSLSKEDASHHEVPQANFAPIEARWFSLSRVDGATVTTADGRGVVYRKRDRDKAKELGKEARALQKQVAERFDELSRAYRNAHPELVSREAWGKVFDEQ

SEQ ID NO: 2819 - DNA, 627 bp, Corynebacterium glutamicum
  CDS (101)..(604): RXA02602
ctgcaaaagcaagtagcagagcgtttcgacgaactcagtcgcgcctaccgcaacgctcatcctgagcttgtgagccgtgaagcctggggaaaggtcttcgatgagcaataaggaagtacagattctggtagcaatccaggatcaactcatggatgccccaggagtactgcccaccgcacgaggactcagcctgctcggcgaacatgctgcaggctggctggcactcggcgctggcggtgctgttgtggacaaaaaacgtcgccgctcctgggctggactcttcatcgctgcactgggaagccacgcagcatcagtgatcatcaaacgagttgtccgccgcgctcggccacatgacccagccatcaggattggtgtgggcaccccctcaaagctaagctttccttcttcacatgcgacctcgacaaccgcaactatggtttatcttgcgcgcatcaccaagtcaccagtgccactgctaggaatccccatcatggtgctatcacgcatggtgcttggcgtgcattacccaaccgatgtgctagccggcgcgttgttgggagcagcgaccgcagaggccgtccataagatcgaaagggctacgaagtgagcgaacacgccgctgaacat

SEQ ID NO: 2820 - protein, 168 aa, Corynebacterium glutamicum
MSNKEVQILVAIQDQLMDAPGVLPTARGLSLLGEHAAGWLALGAGGAVVDKKRRRSWAGLFIAALGSHAASVIIKRVVRRARPHDPAIRIGVGTPSKLSFPSSHATSTTATMVYLARITKSPVPLLGIPIMVLSRMVLGVHYPTDVLAGALLGAATAEAVHKIERATK

SEQ ID NO: 2821 - DNA, 2199 bp, Corynebacterium glutamicum
  CDS (101)..(2176): RXA02604
tctgcatcgtgatggctgtgtacatcatgccgatgttttgaatatttaccaatgaacatgctctgaccagcatgtccattaacgtttgaggccacatgcggtgctagcatgtggcctcatgacgtttagcccccagcgtccggagtttgagaccggtaagcagccagatccagaaactgaacacgcaggtgacttctttgaagaaacctcaagcagtgctcctcgcgccgcatctaacggttcttctggtccgaactacaccctcattacaacgtttctagcggcccttactgctggcatctttgctttctgggcaggctggacccgcaaatggatcagcgacgacggactgatcgtcctacgcaccgtccgaaacctcctggctggaaacgggccagtattcaacgctggcgaacgcgtcgaagccaacacatctactctgtggcaatactgcatctatctggttgccttagtaactgactatcgcctcgaagatattgctctgtggcttgcgctgctgttcaccaccgcagcgtccatcatcggtgtcctgggtaccgcgcatctccaccgcaaacgcattgccgtattgcttcctgcaggcgtgatcggctacttcagcctttccccggcgcgagactttgccacttccggattggagtggggcctatctttgatgtggatttccatccaatggctgctgctggtgttgtgggcgacttcgggcaagacctcgggcaagaaggcttcgggcgcaaaaacttcaaatcctatcgttaatgccggtgcaataacctatgctttggccttttggtcaggcttgagctggctggttcgcccagaactggcgatgtatggcggtttgactggagtgttgctgctgcttactgcgccacgatggcgggtagttttggggatcctggtggcggctttgcctcttccagctgcgtaccaaatcttccgcatgggttattacgggctgatggtgccgcacacggctgtagcgaaatcagcctcagatgcggtgtgggggactggttgggaatatgttgaggatttcacggggccttacaacctgtggctcggtttggccttgctgttggccgcaggcgcgttgacagtgtggaaaactgacaagcacttagcgataccgaaggggcggctggggctgcgcactccgggtatggctatagcgttgctggttatctgtgcgctcgtccacttcctttacgttatccgtgttggtggcgacttcatgcatggacgcatgctgctccttccactttttgccattctgctgcctgtttctgtcattccggtcaatgttgttgatcgaggttggcaggatttggttgcgctggttctcgttttctctacgtgggtgtggtccactgtggtttttgtgcaggggcaccaatgggaaaataccggccagcatgtggttgatgagcgtgatttttggattgatttcaccaaccgagatgaagatcatcctccgctttatgcagaggatttcctcactgttgattccatgaatgattacgcagaggttatgcgcgatcagacgttggttaatccaacaggccagcaactcaatattctggccagcagtgacccgaccacttattcgtggatcaccacacctcgcgtggagggggttgaagccggtgatttggctaacctctcgccaactgttttccatgtgaacctcggcatgacctccatgaacgcaccgctcaacgtgcgtgtgacagacctgattggtttggcaacgccactggcagcccgccagccacgcattgaaggtggtcgaatcggccacgataaattgatggacttggaatggcaggtcgcggaatccgccactccgctggcgtacacaccgggttggttggatactcaaaagacttatgaggcccgccaggcgctacgccacccagaattggttcaccttttccagacttaccgtgagccaatgtcctaccaccggtttgtggacaatattaaatacgcactcactaccggaagaacactggaaatttcagataatcctgaagatcttttgaaagaatttaacccgacccctgcagagattcaggacgggttagaaactattgcttggcctggggaaattaaacttgatgaacctcgcggagaacctttatatagctctcagtaaacacttattcgcaaatcatt

SEQ ID NO: 2822 - protein, 692 aa, Corynebacterium glutamicum
VLACGLMTFSPQRPEFETGKQPDPETEHAGDFFEETSSSAPRAASNGSSGPNYTLITTFLAALTAGIFAFWAGWTRKWISDDGLIVLRTVRNLLAGNGPVFNAGERVEANTSTLWQYCIYLVALVTDYRLEDIALWLALLFTTAASIIGVLGTAHLHRKRIAVLLPAGVIGYFSLSPARDFATSGLEWGLSLMWISIQWLLLVLWATSGKTSGKKASGAKTSNPIVNAGAITYALAFWSGLSWLVRPELAMYGGLTGVLLLLTAPRWRVVLGILVAALPLPAAYQIFRMGYYGLMVPHTAVAKSASDAVWGTGWEYVEDFTGPYNLWLGLALLLAAGALTVWKTDKHLAIPKGRLGLRTPGMAIALLVICALVHFLYVIRVGGDFMHGRMLLLPLFAILLPVSVIPVNVVDRGWQDLVALVLVFSTWVWSTVVFVQGHQWENTGQHVVDERDFWIDFTNRDEDHPPLYAEDFLTVDSMNDYAEVMRDQTLVNPTGQQLNILASSDPTTYSWITTPRVEGVEAGDLANLSPTVFHVNLGMTSMNAPLNVRVTDLIGLATPLAARQPRIEGGRIGHDKLMDLEWQVAESATPLAYTPGWLDTQKTYEARQALRHPELVHLFQTYREPMSYHRFVDNIKYALTTGRTLEISDNPEDLLKEFNPTPAEIQDGLETIAWPGEIKLDEPRGEPLYSSQ

SEQ ID NO: 2823 - DNA, 372 bp, Corynebacterium glutamicum
  CDS (101)..(349): RXA02609
gaccgaacgcagcagtcaggcgtcgcaaagcaatggaagcggcggaagcacagcccgggacggggcagccgaggaaatcgacggcctgcccgaggtgaccgtggaacgcagcgctgaggcgcaagcgttcctggatgcgctgaaagatgaaaaaatcgacatctccggcgtggaggaccagttgattgcgactgcgcgaaattactgcagttcggaaaacaaggaccaaaacgtcactgtcgatgcggttgcaggccagctcatcgtgcagggacgcaccagcgtgaaggaagatcaagcagcggaaatttctacgctgctgaaggaatctgcggatcggacgtattgttaaccgatgaggaaaaccatcac

SEQ ID NO: 2824 - protein, 83 aa, Corynebacterium glutamicum
VERSAEAQAFLDALKDEKIDISGVEDQLIATARNYCSSENKDQNVTVDAVAGQLIVQGRTSVKEDQAAEISTLLKESADRTYC

SEQ ID NO: 2825 - DNA, 630 bp, Corynebacterium glutamicum
  CDS (101)..(607): RXA02617
ctctttaattaacttttgggcgaccctttacggtcgtcctcttgcgttcccaaaacatacccagtaagttactgggtatccaactcttgattggggaacaatgtccataaaacatgcactcttggtgctcatgctcgacgaaccaacctcggcaagtcagctgcaaaccaagtttgaagaaacaatggggatctggcagctcaatatcggccaagtcacccaaaccatccagcggctacagcgcgacggcctggcggaaaccgcaggcaccaccgtcagttccaacggccgcaccgtagatactttccagcccacggacttaggtcgcgaacttgtcgcgcagtggttcgaaagtcccgtcaccgtcacactgtccgaacgcgatgaattagtcaccaaaatcgccatcgcagaatcacgtggcctcaatttgattccacttttagacattcaacgcaacacagtcatggcggaactacgcgcactcaacaaatccagccgcgatctcgccgaaaccagaaacacccagcggctcctcgtcgaaaagcgaatctttgaactagaagcccaggcacgttggctcgaccgaattgaagcattggagcagtaaatgacaaacacgcctttccc

SEQ ID NO: 2826 - protein, 169 aa, Corynebacterium glutamicum
MSIKHALLVLMLDEPTSASQLQTKFEETMGIWQLNIGQVTQTIQRLQRDGLAETAGTTVSSNGRTVDTFQPTDLGRELVAQWFESPVTVTLSERDELVTKIAIAESRGLNLIPLLDIQRNTVMAELRALNKSSRDLAETRNTQRLLVEKRIFELEAQARWLDRIEALEQ

SEQ ID NO: 2827 - DNA, 1023 bp, Corynebacterium glutamicum
  CDS (101)..(1000): RXA02619
agcgacttctcaaagaaccaccccactcatttcgagtgcgggtggttttttctatgcctaattctatgcctaattctatgtctgattctattggtgtcgcatgcgcagtgtagttttagaactactagagaactggaaggaatcactcgtgcttcacccctcattgactgagctagcggatgctgccccacttgcacaggattttgccaccgtccgcggtgtgctgaaggaatcgctggatttgttgggcaatgcactgaaccacggtgaagagcccgcggagcttgcagggtggctgtcacaagttattactgatgttttgcactcccctggcttggatgcccacgtggtgctcaccggccccgtggggcgtggagacgcactgcctacctcgcccgtgaggtggctggcggtcgtcgatagccaagaagatccgaatgaaaagatttcagcgctgttaactgaggtgggcttcattgcggagccgatcggtgcggcaactcgtgaggagtgggagcagcgtgcgcgcgctggtgaggatccagaggtctatttggatgctggcacgtgggtcgcggcgatcgctgaagtagatgacaaagcactgttgcaggatgcgttgtcatctaggccgcctgcggtggaaacttatgagggtcttccttcgttggacatggtggtaaacattcgtgagaacctcatgattcccacggtgaagatcgctcgctgggcagcacacaaggctggttctttggcgcctacgactgcgcagcgcctcgtggatgcccgtggtgtgctcaccaatgatgaagtcgacgcgctgacacaggtgtggacttccgcactgagcttgcagtcgaaacgttggatggatcacatccatgatcaagaaaccaccgcttgggagcttcccgcgctgcaacgtgccacttttggcgcatcggctcggttgctttctgaggtgttgcggtccgttgaagcccgtgaaatcgataccaaataggaactctgcacaattactgg

SEQ ID NO: 2828 - protein, 300 aa, Corynebacterium glutamicum
MRSVVLELLENWKESLVLHPSLTELADAAPLAQDFATVRGVLKESLDLLGNALNHGEEPAELAGWLSQVITDVLHSPGLDAHVVLTGPVGRGDALPTSPVRWLAVVDSQEDPNEKISALLTEVGFIAEPIGAATREEWEQRARAGEDPEVYLDAGTWVAAIAEVDDKALLQDALSSRPPAVETYEGLPSLDMVVNIRENLMIPTVKIARWAAHKAGSLAPTTAQRLVDARGVLTNDEVDALTQVWTSALSLQSKRWMDHIHDQETTAWELPALQRATFGASARLLSEVLRSVEAREIDTK

SEQ ID NO: 2829 - DNA, 777 bp, Corynebacterium glutamicum
  CDS (101)..(754): RXA02620
atcgataccaaataggaactctgcacaattactggctacaatctcttgagatcaataggccaaaactttaaggaagtagaattacgctatggcaggagcagtgggacgcccccggagatcagctccgcgacgggcaggcaagaatcctcgcgaggagattcttgacgcctctgctgagcttttcacccgtcaaggcttcgcaacaacctccacgcatcaaatcgctgatgccgtgggaatccgccaagcctcgctgtattatcacttcccgtccaagacggaaatcttcctcaccctgctgaaatctactgtcgagccgtccactgtgctcgccgaagacttaagcaccctggacgccggacctgagatgcgcctctgggcaatcgttgcctccgaagtgcgtctgctgctgtccaccaagtggaacgtcggtcgcctgtaccaactccccatcgttggttctgaagagttcgccgagtaccacagccagcgcgaagccctcaccaacgtcttccgcgacctcgccaccgaaatcgtcggtgacgacccccgcgcagaactccccttccacatcaccatgtcggtgatcgaaatgcgtcgcaacgacggcaagattccaagcccgctttccgcagacagcctcccggagaccgcaattatgcttgccgacgcctccctcgccgtcctcggcgcgccgctgcccgccgaccgggtcgaaaaaacgcttgaactaatcaagcaggctgacgcgaaataaccatccgcgcctgcgaaatc

SEQ ID NO: 2830 - protein, 218 aa, Corynebacterium glutamicum
VGRPRRSAPRRAGKNPREEILDASAELFTRQGFATTSTHQIADAVGIRQASLYYHFPSKTEIFLTLLKSTVEPSTVLAEDLSTLDAGPEMRLWAIVASEVRLLLSTKWNVGRLYQLPIVGSEEFAEYHSQREALTNVFRDLATEIVGDDPRAELPFHITMSVIEMRRNDGKIPSPLSADSLPETAIMLADASLAVLGAPLPADRVEKTLELIKQADAK

SEQ ID NO: 2831 - DNA, 957 bp, Corynebacterium glutamicum
  CDS (101)..(934): RXA02639
cgaaaatgttggaaatcgccgaacgggaacgtcgacaagcaaaacgcgcggcaaaggtcgccaagaaacgcaccacctttataaggaaaatctttaaaaaatgattgcactgggttcagcgcccaagctggttgcctccgatgttgatggcaccctcatcaatagttctgagcgcgtgccgcaacgcctgcgcgatgtgatcacgcggatgaccaatcagggcgtgaccctggcgctgtccacgggccgcccgccgcgctggattcattatgtgctggatcagctgagcgtgaagccgatttgcgtctgcgcgaatggcgcggtgctgtacgattccgctgccgatgagattcttgcagctcagacgcttagtccggaggttatggcgagtgccgtcatggctgcgcgtgccgctttggaagagcatggcggggtcagtattgctgtcgagcgcgctggaaaatccgcttacgatccagccgatgagctgtttttggtcaccccggaatacagccacgcgtggccctcaaatgatcacggcaccttcgaggaagccgaagtgctttccgaaccagccaccaaattgttgatgcgcagcgattacctcgattccaagcagctttttgatatcgtccgcgcctccgttcccgaggatcaagtccacgtcaccttctccatgtccggcggactcattgagatcgcagcgcccggcgtgaccaaggcactgggcgtatcgatgctggcagagcgcctaaagattgcgcaaaaggacgttataacgttcggcgacatgcccaacgatattgaaatgctccagtgggccggccggggagtggcgatgggcaacgcccgaccagaggtcaaagccgtgtcagaccacatcacccgcaccaacgacgacgccggtgtagcagatgtattggagtggtggttctaataggtggtgttaaaacactg

SEQ ID NO: 2832 - protein, 278 aa, Corynebacterium glutamicum
MIALGSAPKLVASDVDGTLINSSERVPQRLRDVITRMTNQGVTLALSTGRPPRWIHYVLDQLSVKPICVCANGAVLYDSAADEILAAQTLSPEVMASAVMAARAALEEHGGVSIAVERAGKSAYDPADELFLVTPEYSHAWPSNDHGTFEEAEVLSEPATKLLMRSDYLDSKQLFDIVRASVPEDQVHVTFSMSGGLIEIAAPGVTKALGVSMLAERLKIAQKDVITFGDMPNDIEMLQWAGRGVAMGNARPEVKAVSDHITRTNDDAGVADVLEWWF

SEQ ID NO: 2833 - DNA, 585 bp, Corynebacterium glutamicum
  CDS (101)..(562): RXA02647
atcttctatcttgtttccatagtaaatccgcatatttattgccaggagaaaagttttgtctttgcgtcgaagtactttgacccttgttacagcaagcgctgtggcattgtccgtgttcactccagttgcccaggctcagtcctctgacgcactgacacagctctcagacaacatcacctcatcacagatccttgatgatgatggaaatccagtcgatggaaacgaaacctggccaggcagctctgaaggcagctcaatgctcagcaatggcgacattcctgcggccccaagcttgagctcctccggcaaagacaccagcgatgatgacgatgaaatcagcgaagagcagcaagcactgatcgatcggttgtccgaaatgccagtgattggttccattgtctccccaccagaatggcttgccattccttttgcggtactgcagggattgctcgcaatcaccactcttgcttccaccgcagcatccttcatggtgaccgtcgacccatcgttcaagcagactctgcgtgacatgctcacccagtttggcatcaacgtcgacgcttaaaagcacactgacataaaatg

SEQ ID NO: 2834 - protein, 154 aa, Corynebacterium glutamicum
VALSVFTPVAQAQSSDALTQLSDNITSSQILDDDGNPVDGNETWPGSSEGSSMLSNGDIPAAPSLSSSGKDTSDDDDEISEEQQALIDRLSEMPVIGSIVSPPEWLAIPFAVLQGLLAITTLASTAASFMVTVDPSFKQTLRDMLTQFGINVDA

SEQ ID NO: 2835 - DNA, 1125 bp, Corynebacterium glutamicum
  CDS (101)..(1102): RXA02649
ttttacacagttgcagcaaaaattcggccattccgattgcttttgacagctaaactttgcatttgttctttttggcgccgatgccgataggtttaaaggcgtgctaaaacgattctctcaccactccagcccgcaagttctttcacggaaagttgtcgcgtccgcattagctttaacaaccgcgctggctttagccgcgtgtagttcctcagccgagccggactcccctgaagttgagcaggcggtgggtcttgcggtggatacgccacgtgtggtggttgtggatccaggcactggcgatttgcagcgcttgcaatacaaagacatcgcccctgatgccacacaggaacagaccatcaatattgctgaaggttttgcccaatcggtggtgaatgcggacagcgtggatccgcaggcaccagccggtggcgatgtcaccacattccaccttcctgttaaagccaccaccgaggaagcggagttcagcgatcaggaaatggtgagcgcgactcgcgatatctctctacttttcggtaaacctacctacaccgatctttcccaagttgaagatgtgaattccaccgagggattcacgctgggaatccgcgcaacagatagtggacagcacaccaccttaagtttcgcagcccctgttgattccactgaaactggtcgcatgctcatggagcaatacttactcacgtttacgtcccttcccattgtgttcccctctgacgatattggcgtgggcgcgaagtggactgtggatagccgtgtgacaggcgaatcaacgctgctacaaaccgtgacctacacgatcacagggatcgacggcgacaaagtaaacctcgatgtggaagtctctcagcgccccagcatgggtgcgttggagatcaccgatgaagaatcggacgagaccaccgggcagctcactgtccttaattccaacaccacctccgtgggcaccttggaagtcgatctgactcagcctttacccacgtcaggacaggtttcttggaccactcgcgtgatttacggcggttccaatgagcaggtgcgtgtggtgcaggattccacctcttcggtgagcttcggagaccagtaatttaccaattagggttgcca

SEQ ID NO: 2836 - protein, 334 aa, Corynebacterium glutamicum
VLKRFSHHSSPQVLSRKVVASALALTTALALAACSSSAEPDSPEVEQAVGLAVDTPRVVVVDPGTGDLQRLQYKDIAPDATQEQTINIAEGFAQSVVNADSVDPQAPAGGDVTTFHLPVKATTEEAEFSDQEMVSATRDISLLFGKPTYTDLSQVEDVNSTEGFTLGIRATDSGQHTTLSFAAPVDSTETGRMLMEQYLLTFTSLPIVFPSDDIGVGAKWTVDSRVTGESTLLQTVTYTITGIDGDKVNLDVEVSQRPSMGALEITDEESDETTGQLTVLNSNTTSVGTLEVDLTQPLPTSGQVSWTTRVIYGGSNEQVRVVQDSTSSVSFGDQ

SEQ ID NO: 2837 - DNA, 702 bp, Corynebacterium glutamicum
  CDS (101)..(679): RXA02652
cgcttggattcaaccacccagcagatggccgatggatggaaatcgtctccccatatccaactgatctccaacacgctttagacgttctccgcgagcaataatggatggtgtcgataaagggcgacgcatcgtcgccctcctagcaattctcgcattggttgtcgtggttgcgatcttgagtttcagcgaccgcaccgcgaaacccatgcagctcaacggtgacatgctcggccaagacaacacggaaacttccgtcgagtaccgtcagcgggcatcggaatcattggaaaatgccgcggtcggcgaagaagcctattcactggtgacgttcacacagccgctttcgccttccgaggcctctaaccttcttaaaggagtcggtcgcgtcaatgccatggttatgctctcggctcctgccatggatctacccgaacccatcgcaggcgagacccgtgaagatgtttttaaccgtcaaataaagcttgtcgacgcccagttatccggtatcggcaacgtccgcgcgccgggcgaactcaacggggtagtggtttgggatattcctcagaaagttcgtgtgttgtccgagagctcgctggtttatagtgtcgaaaccctgccacctgacgcggcgtggggcagtttcggtattcgaccagtcgatacttcgggtactaatttttagaagaaaattccagatgcccc

SEQ ID NO: 2838 - protein, 193 aa, Corynebacterium glutamicum
MDGVDKGRRIVALLAILALVVVVAILSFSDRTAKPMQLNGDMLGQDNTETSVEYRQRASESLENAAVGEEAYSLVTFTQPLSPSEASNLLKGVGRVNAMVMLSAPAMDLPEPIAGETREDVFNRQIKLVDAQLSGIGNVRAPGELNGVVVWDIPQKVRVLSESSLVYSVETLPPDAAWGSFGIRPVDTSGTNF

SEQ ID NO: 2839 - DNA, 1107 bp, Corynebacterium glutamicum
  CDS (101)..(1084): RXA02655
aattcgatggagaagaaaaagtcatgggggtcaggctaggagaaaatgatctcatgatggctttggaacggtacctcgctcacgagtttggtgaaattagatgagtccagaagccaaagaagcccaagattctaggcgcaacgagatgcccgagaaaaagcgagcggtgctacgtaaagcgattaagttggaatgggcaacgatcgcatgggttcttttttcgatcgttttggtaggtgttgtcgctggtcaatcgcaggccatgcgtagtgcatggattgaagacatgctttctttggtaccacctatcgcttttcttttagcctcccgaatcagcaaagctgtggcaaccagaaaacatccatacggcaagcaccggtcgattgctatcgggcaccaagctgcagcactggccctgcttatcatgggaagccttttaatttatgaagcggtatctgcactgatcaagggagaaaggcctccgataggtttagctattttatttggccatgacgtgtggtcaggttggttaatgatcggggttatgatttcagtgtcgatcccgatggtgattgtagggcgagtaaaaataaacttagctaaagatctccacgataaactcctctatgcagacgcggatatggccaaggctgactggggcacagcagtcgctagcacagtaggcgtgctcggaataggactgggtttttggtgggcggatgcagttgcagctctagtaatatcagcttcaattctcagagatggcgtgataaatatgaaagctgctatatctgacttaggtgatggacgagccatgacttatgacaattccgcccctcacccattaaatgatgatgtggaaaaggctgccctagagatgcattgggtcaaacacgcccgcgctaggatacgcgaccaaggccgctgtttccacacagagttatttgtcgaaccagtagaaggatacacacctgctccggaagaaataacttctctagttaagcgaatccaaaaccttgactggaagctgcaagatgtcgtagcttccgtcgtcgaaaaaatcgaccggtttcaggccccttcgtaaaacttaactgagaaagtgat

SEQ ID NO: 2840 - protein, 328 aa, Corynebacterium glutamicum
MSPEAKEAQDSRRNEMPEKKRAVLRKAIKLEWATIAWVLFSIVLVGVVAGQSQAMRSAWIEDMLSLVPPIAFLLASRISKAVATRKHPYGKHRSIAIGHQAAALALLIMGSLLIYEAVSALIKGERPPIGLAILFGHDVWSGWLMIGVMISVSIPMVIVGRVKINLAKDLHDKLLYADADMAKADWGTAVASTVGVLGIGLGFWWADAVAALVISASILRDGVINMKAAISDLGDGRAMTYDNSAPHPLNDDVEKAALEMHWVKHARARIRDQGRCFHTELFVEPVEGYTPAPEEITSLVKRIQNLDWKLQDVVASVVEKIDRFQAPS

SEQ ID NO: 2841 - DNA, 387 bp, Corynebacterium glutamicum
  CDS (101)..(364): RXA02662
ccaaggtgtcaccctcaccgttgccatcgccttcatcatcgtcaatatcgccgtggacctgctctacgtcctggtcaatccacgtattaggagcatctagatgcgccgtaaactaaccaccacattagaaaacaagcccggtgcacgacttggtggcttccgcgcacttgcaccaacttcaaaaatcgcgctggttttccttctcctgatcttcctcctcgcgatctttgccccactgattgctaaatacgatccactggcctccggaactccagtccagcctccaagcggtgagcactggtttggtaccgacgccatcggccgcgatattttctcccgcgtagccacggcgccagagcctccctgatcattggtcttttcgctacg

SEQ ID NO: 2842 - protein, 88 aa, Corynebacterium glutamicum
MRRKLTTTLENKPGARLGGFRALAPTSKIALVFLLLIFLLAIFAPLIAKYDPLASGTPVQPPSGEHWFGTDAIGRDIFSRVATAPEPP

SEQ ID NO: 2843 - DNA, 603 bp, Corynebacterium glutamicum
  CDS (101)..(580): RXA02665
caaggcgacccaatggcgtttaaagtaacaacccccattgatatgatgctggcacaacgcatcaccgacgaagccgaacccacaatatttgaggtaccaggtgactaacccaatcatcccccgcgtaggaatcgccacagacgcccaccaaatcgaagcgggaaaaccctgctggatcgcctgcctcctctttgaaggcgtcgacggctgcgaaggccactccgacggtgatgttgtagctcatgcaattgtggatgctctcctttctgcctctggtctgggggatttgggctctttcgttggtgtggggagacctgaatacgatggtgtttctggtacacagttgttgaaggaagttcgggagctgctttcggcacacgggtacgtcattggaaatgtcgccgcccaactggttggccaaacccccaaatttggaccccgccgcgaagaagcacaacaagtcatctccgaaatcatcggcgcaccatgctcactgtctgccaccaccactgatcacatgggattcactggtcgcagcgagggtcgtgcatcggtagcaacggcagtggtgtggaaggcttaagttttctgtagggattgggc

SEQ ID NO: 2844 - protein, 160 aa, Corynebacterium glutamicum
VTNPIIPRVGIATDAHQIEAGKPCWIACLLFEGVDGCEGHSDGDVVAHAIVDALLSASGLGDLGSFVGVGRPEYDGVSGTQLLKEVRELLSAHGYVIGNVAAQLVGQTPKFGPRREEAQQVISEIIGAPCSLSATTTDHMGFTGRSEGRASVATAVVWKA

SEQ ID NO: 2845 - DNA, 705 bp, Corynebacterium glutamicum
  CDS (101)..(682): RXA02670
ccgtttaatcaaccgactgtgtgaatgcgcttaaacggactagggttgtgagcagcatatccagatttttctggataaatcctggaatttcttaaaaccaatggaggacgaatccgtgaagtccctgaacttggctgcccgtcgtggcgcgctcgtgaccgtggctgctgcgtcagctcttgcgcttgcatcctgcagtgccggacagatcacccagacctcaagccaggttgcagcagttgatggcaaccaggcaggctccgcgaacgacccagttctggtgcgtgatgtaaccgtgcacctcaccaccgacggcgaagctggagtaaagttcaccgccatcaaccaggacacctctcacacttctcacacccttgagtccgtcaccgttgacggcgaagaggttgagcttgatgatgcagagccaatcgagcgcaactgctccctcgttgcagacatccagtccgaactggatctgatcgaggagccagaagttggctgcatccagcacgtagcaacttctctggagaacccaggtttcgcatacggcggagtcgtgccagttgagttcgtcttcgacaccggtgcgatcaccatcgatgccaccgtttccgcacctgtcctcgagtcaggcgtagaaaaccgcgaggtcggcggagacactgcagaggcaagccaccactaagcctctcaaagctgcttgaa

SEQ ID NO: 2846 - protein, 194 aa, Corynebacterium glutamicum
MEDESVKSLNLAARRGALVTVAAASALALASCSAGQITQTSSQVAAVDGNQAGSANDPVLVRDVTVHLTTDGEAGVKFTAINQDTSHTSHTLESVTVDGEEVELDDAEPIERNCSLVADIQSELDLIEEPEVGCIQHVATSLENPGFAYGGVVPVEFVFDTGAITIDATVSAPVLESGVENREVGGDTAEASHH

SEQ ID NO: 2847 - DNA, 1221 bp, Corynebacterium glutamicum
  CDS (101)..(1198): RXA02672
agcagtcatccccggaggctcaggcatcaaacaaacaagcctgagagtcatcgaagcttcaacacttgccgaagcacttgcagcagtaagcttataaagcatgacaccaacaaccactcctgtatcaaacccagatgccctttccactggaactcaggatgtgcacaccctcaaaggaacgttgcagcgcctcgccccaggcacaccacttcgcgatggcttagaccgcatcgtccgaggacacaccggcgcgttaatcgtcattggtgatgatgaaaacgtctcctcgatctgcgacggcggctttgaattcgacgtttcgtttgctgcaacccgactccgcgagctgtgcaagatggatggcgctgtcatcttgtcttccgaccttgagcgtatcaaacgcgccaatgttcagctgctgccttcaccaacctggccaacccaggagtccggcacccgccaccgttctgcagaacgcaccgcgcttcacaccggtgtgccagtgattgcggtatccgaatcacaaaacaccatcactctctacgtcgagggcaaatcccacatgttggagcagccagctgccctgcttaaccgcgccaaccaagctttgggaacaatggagcgctaccgcgatcgtctcgatcaggtcaataaccgccttcacctggctgaactccacagctatgtcaccgtgattgatgttgtttctgtcattcagcgcgaggaaatgctgcgccgagtgggtgaaatcattgatggcgatgttcttgaactaggcaaagacgccaaggagattcagatccagctcagcgaattacgtggcgataatgaccgagaacgtgaatcaatcattgctgattaccttgtcaccgacggtattcctgcagatgaggaaatccacgcagccctcgaagcgatctcacatttagatgataaggctctgctgaatcctgcgaacatcgcgcgtgttcttggactgccaccgaccgaggaagcacttgatgagccagtcactcctcgcggctaccgcacgctcaacagaattcctcgagtgcaaaaattcctcatggataaactcatcgtggaattcggcaacttggatgcactgctcaatgcgtcagtagaggatctaagtgcagtcgatggtgtgggctcactgtgggcacgccacatcaccgacggacttggccgtttaagttaggttaaaggtcaccgctggtg

SEQ ID NO: 2848 - protein, 366 aa, Corynebacterium glutamicum
MTPTTTPVSNPDALSTGTQDVHTLKGTLQRLAPGTPLRDGLDRIVRGHTGALIVIGDDENVSSICDGGFEFDVSFAATRLRELCKMDGAVILSSDLERIKRANVQLLPSPTWPTQESGTRHRSAERTALHTGVPVIAVSESQNTITLYVEGKSHMLEQPAALLNRANQALGTMERYRDRLDQVNNRLHLAELHSYVTVIDVVSVIQREEMLRRVGEIIDGDVLELGKDAKEIQIQLSELRGDNDRERESIIADYLVTDGIPADEEIHAALEAISHLDDKALLNPANIARVLGLPPTEEALDEPVTPRGYRTLNRIPRVQKFLMDKLIVEFGNLDALLNASVEDLSAVDGVGSLWARHITDGLGRLS

SEQ ID NO: 2849 - DNA, 1041 bp, Corynebacterium glutamicum
  CDS (101)..(1018): RXA02678
ctgtgggcgcgcgaacagggcgtcgacatgctcgccaccaattatccggaccgtgcggcggagcttttgaacgcacatcccaagcccgccatgtacgctaatgcgcatggcaaagaagactaagaagaatgaacagctgccggagggcatgagccgtcgtcaggcaaaacttgcagcccgcgcggctgaacgtgcagcacttgagcgtgaacctcgcccattcgagggcctggcaatggagtcacagctcgttgcactgcaggaattcattccatctgcaaccgcacccatcaccgttgcaggcaccgatcgcaagatcaccctctgtaccgtgcttccaggcgcagctgcggcacttgtccgcgaagaagcattcggcggcgaagcgtttgttgcaatgcagcaggccatccgctccaacaacccaagcaaggacctcgcgttcgcgctgaactgggtcatcaacgcaaaagccggcgagtcactggccaccgccacagcggacggcacccagccagagctaaagagcttgcttaacgacgccgacaccctcgaaatcaccactcaccaggacttcaactggtggctggcggaaaacgacaacctctccccagaagttgcgcagcacatgcaggcagccaatgactccatcctgccttcacacgaagtcgaagcagacgtcccaggcgctgtttggtgggtcaacccaggcggaaaagcgcacatccgttgggtccgcaccgaaaacgaaaccgcactgttcaacgctttggcacgcatcgcagcacgtggcgagctgaatctcggcgaagaaactaagttcgctggtgctttccgcacccacggcatcgtcgtcccagtgtgggatctcgatcctgagcgtccatccaccgattacgccgatgttttggttgcactcaacgagaagatcgtcgctgaactggataacgatgcacagctcaacgccgacgagcgccgtcagctggagaacatcaagtcccgccaggtgaccatccgctaaaatctcttaaaaacacttca

SEQ ID NO: 2850 - protein, 306 aa, Corynebacterium glutamicum
MRMAKKTKKNEQLPEGMSRRQAKLAARAAERAALEREPRPFEGLAMESQLVALQEFIPSATAPITVAGTDRKITLCTVLPGAAAALVREEAFGGEAFVAMQQAIRSNNPSKDLAFALNWVINAKAGESLATATADGTQPELKSLLNDADTLEITTHQDFNWWLAENDNLSPEVAQHMQAANDSILPSHEVEADVPGAVWWVNPGGKAHIRWVRTENETALFNALARIAARGELNLGEETKFAGAFRTHGIVVPVWDLDPERPSTDYADVLVALNEKIVAELDNDAQLNADERRQLENIKSRQVTIR

SEQ ID NO: 2851 - DNA, 801 bp, Corynebacterium glutamicum
  CDS (101)..(778): RXA02683
gacggtttcttctgtcatgacggaaactcctacttatacctcttcatctaggtcggtggaatctaccgcggggacgatcgctgcctcggaggaagccacgatgacgctactggagaatagttcgggggatccgggatctgattctgggggtgcacgctatagcctcaattcgctcaaagtttctgagcaggccgcggctaacgccgtcttaaaggccgtgcttaacgacgtctcctaccaagagttcgcagactcctcctacttagaaatcacaggaacgccctccgccgacggaacatggggcatctcatttggcggaccttccgaatcggcctccgtggaattctccgacggcagcatcagcttctcccctgttgacatgacagtgcccgcaacacgattgcctcagatgggcgcattttatgaaaccctgaccgaagaacaattaggcatgctggagactggcctcgcggtttccaccgtggattcgagccaacaggaaatgcttctggacttggtctccaactcgatcggcctggcagatactgaaaccactgcgactgcaattagtaaaatccgagcaacgctttccgagacctacctgttcggaacccccgacggattaaccttggcgcttagtggcccacacgttgatttcgaagtctcccaccagggcagcaccgcgaaaattacttaccgcgatccaagcaccgacaccttaaccgccgaagatcgggtagataccgcaagtgtggctgctgctccgccggaggttgtttaggcgtttgccgagaaattttc

SEQ ID NO: 2852 - protein, 226 aa, Corynebacterium glutamicum
MTLLENSSGDPGSDSGGARYSLNSLKVSEQAAANAVLKAVLNDVSYQEFADSSYLEITGTPSADGTWGISFGGPSESASVEFSDGSISFSPVDMTVPATRLPQMGAFYETLTEEQLGMLETGLAVSTVDSSQQEMLLDLVSNSIGLADTETTATAISKIRATLSETYLFGTPDGLTLALSGPHVDFEVSHQGSTAKITYRDPSTDTLTAEDRVDTASVAAAPPEVV

SEQ ID NO: 2853 - DNA, 780 bp, Corynebacterium glutamicum
  CDS (101)..(757): RXA02685
tagcagcatttgtggaaagagctgtggcatgagtagttcagtaatgtcaccgcgtcgaataaaggcggaaatacttatcgttttagccatcacctttggcatgagcggcctgcgatcaatcctgcgcctcatcgacgatctcctcgcaccggttgcgctcaacgaccagcaagttgcactgaatgcctcaatggcaaactccgcatggctggatctcaccttgcaattgtgttccgccggagtgctgttttcctggggagcactagcgatctacctgctaggtgaacgttttcagtggattaaacccaaagactgggcatggggtgcaggccttgcagcactcattggtattccagggttaatcttctacgccagtgctgttcatttggggctgtccaaacaggttgtgcccaccacgttggaaacctggtgggaaatcccagtacttcttatctggtcagctgccaacgcctttggtgaagagatcgtggtagtcatgtggtttttcaccaggctgcgccagctgaagtggagtgtgcctgcagttatcgtgacatcttcagtactacgcggttcctatcacctctaccagggaatctctgcaggcttgggcaacatcatcatgggagtagcgttcgcgtacttctatcaccgcacgggcaaaatctggccactggtaatcgctcacttcttgattgatgcggtggcttttgtgggctactccgcaattggcgggaatttaagttggttagggctttaaactgaagttcctattttatt

SEQ ID NO: 2854 - protein, 219 aa, Corynebacterium glutamicum
MSGLRSILRLIDDLLAPVALNDQQVALNASMANSAWLDLTLQLCSAGVLFSWGALAIYLLGERFQWIKPKDWAWGAGLAALIGIPGLIFYASAVHLGLSKQVVPTTLETWWEIPVLLIWSAANAFGEEIVVVMWFFTRLRQLKWSVPAVIVTSSVLRGSYHLYQGISAGLGNIIMGVAFAYFYHRTGKIWPLVIAHFLIDAVAFVGYSAIGGNLSWLGL

SEQ ID NO: 2855 - DNA, 792 bp, Corynebacterium glutamicum
  CDS (101)..(769): RXA02688
gtgcggaagacagcacgccccaaaccgaccaactagctaagctacacaaggcggacgaatgggttcgcgcagcaagcgaaggaaggaaacttaactagccatggccggccggattattttgctacgacacgggcagactcacaacaacgtcaaacacctcctggacacccgcccaccaggagctgaactcaccgacctgggccgtaaacaagcccttgaagttggccacgaactagccacctactccggtgagcgcctcgcccatgtgtacagctccatcgtgttgcgcgcccaacaaaccgccgtgcttgccacctctacctttgaaaaagctcgcgacatgcagtccggtgcgattccactcgacgttgtggaaggcattcaggaaatcaacgtcggcgactttgaaatgcgcggcgatgaagaagcccacatgaattactcccgcgcactcaacggctggcttcacggggatcctgccgctggtcttcccggcggtgagacctacaaagacgtgctgaaccgctaccagccgactcttgatcgaatcatggacagccacgaccttgacgacgaccgcgacgttgccgttgtcagccacggcgccgtcatccgcatcgtggcaacacacgcaactggtgtggatcccaactttgcgttcaacacctacctgggcaactgccgcttcgtggtgctggagccaaacggtaagaaattcagccaatgggatgttgtgcgctggactgacagcccactgccatggcaggagtaattgagaccaaaggctcggat

SEQ ID NO: 2856 - protein, 223 aa, Corynebacterium glutamicum
MAGRIILLRHGQTHNNVKHLLDTRPPGAELTDLGRKQALEVGHELATYSGERLAHVYSSIVLRAQQTAVLATSTFEKARDMQSGAIPLDVVEGIQEINVGDFEMRGDEEAHMNYSRALNGWLHGDPAAGLPGGETYKDVLNRYQPTLDRIMDSHDLDDDRDVAVVSHGAVIRIVATHATGVDPNFAFNTYLGNCRFVVLEPNGKKFSQWDVVRWTDSPLPWQE

SEQ ID NO: 2857 - DNA, 465 bp, Corynebacterium glutamicum
  CDS (101)..(442): RXA02689
gtgaagttcccccacctcagccagagcgcgatccgctccgtgacactgcaggaacgacagcatccgcggaggtcggagtacctgtagaggagaacgctccatgattgaagtcagcgacgaacgcttcgaggaactggtcgaactagccttcgaccaagttccccagcaattcctggatcatatgcgcaacgtggttttactcattgaggatttcaacccagattcgccttatatcttgggtttataccacggcgttgctctcacagagcgcacattcaaccacggtggcctgccggattccatcaccatttataaaggtgcgttgcaaaattactgcaattcagaggaacaactagtggagcaggtgcgggtgaccgtgctgcatgagattgggcattattttggcctcggcgaagaggacctgcacaggctcggatacgcctaaaacgcctcattaggtgcaca

SEQ ID NO: 2858 - protein, 114 aa, Corynebacterium glutamicum
MIEVSDERFEELVELAFDQVPQQFLDHMRNVVLLIEDFNPDSPYILGLYHGVALTERTFNHGGLPDSITIYKGALQNYCNSEEQLVEQVRVTVLHEIGHYFGLGEEDLHRLGYA

SEQ ID NO: 2859 - DNA, 1221 bp, Corynebacterium glutamicum
  CDS (101)..(1198): RXA02690
tttccttgtaccgaaccgaccgatattctttaaaaacattggttacacgctccgaagatctctgacgtgaacccattttggtggcatgatggtgtcaattatgagtacaaactttgacacttcgacgtctccagagggtgaaaccaagaagaactcttctttccgcactgcggcctctgtgcagaccatgcttgttgcagctttggcagcaacggctgctgttggcgtgtactcctacaacacggacaattcagcaaacggcggcgaatcccccacaggacctgagcaaagtacagtgtccaccaccgcaactattgcctcatttaccactgctgacgtgggccaatgtgcaacctgggatgttaacaatgaaggtctagtgtctggttttgaacaaaccagctgcgatcaagagcaccgctttgaaatttctgctcgggaaaacttggcaacttacccaagttcggaattcggtccggacgcagctccaccaaacctcacccgtcaggcgcagctgcgtgaagagctctgccaatctcctaccttggcgtatttgaataaccgtttcgatccatcggggcgctacaccatcgccccgatcctgccacctgcggaagcgtgggctgcgggagatcgcaccatgctctgtggacttcaggcaaccgacgcttcaggcactccacaactcaccgtcggaccgatagcagccaatgaccaggcacgcgtttttgaaaccggcgcctgcgtgaaggtggaatcctccgcagagttccgccaagttgattgcacggaagatcaccacctcgaatcaattttgacagtcaaccttggtgtccccttcccacagggcgcgcccagcacggatgagcagaacaatttcctcggaaacacctgcacccaagcatccattgattacctaggctccgaagaaaacgtctaccaatccaccctgcagaccttctggccaacgattacctccaactcctggttgggcggttcacacagcgtgaactgcttcctcatgtcaccatccaccgagggtgctgcaacatttaacaccctcaacggttcagcgactggcacattcaccatcaacggtgaagttcccccacctcagccagagcgcgatccgctccgtgacactgcaggaacgacagcatccgcggaggtcggagtacctgtagaggagaacgctccatgattgaagtcagcgacgaacgc

SEQ ID NO: 2860 - protein, 366 aa, Corynebacterium glutamicum
MSTNFDTSTSPEGETKKNSSFRTAASVQTMLVAALAATAAVGVYSYNTDNSANGGESPTGPEQSTVSTTATIASFTTADVGQCATWDVNNEGLVSGFEQTSCDQEHRFEISARENLATYPSSEFGPDAAPPNLTRQAQLREELCQSPTLAYLNNRFDPSGRYTIAPILPPAEAWAAGDRTMLCGLQATDASGTPQLTVGPIAANDQARVFETGACVKVESSAEFRQVDCTEDHHLESILTVNLGVPFPQGAPSTDEQNNFLGNTCTQASIDYLGSEENVYQSTLQTFWPTITSNSWLGGSHSVNCFLMSPSTEGAATFNTLNGSATGTFTINGEVPPPQPERDPLRDTAGTTASAEVGVPVEENAP

SEQ ID NO: 2861 - DNA, 1359 bp, Corynebacterium glutamicum
  CDS (101)..(1336): RXA02700
tgacaactgatgcggacgacaacgatcgaatttatagtcaaacccctcgtgcacgcagcgaagtctcggtagggggagaagttacagtaagggcgttttagtggttccctcgttgcagcaatggcgaaaacctgctctcatcctggccattttgacggtgctaggcgtactcctgacccattggttcgcctggccactcacctggccgctggggctgcgtcttcccgttgatgtagaggtgtactggcagggtgcgcgcgagttttggctcgccgatgatctctacgacatcaggtatgacaccactttcgacaacttgccgttcacctatccccctttcggtgcgttggtgttcaccccattgtggtggattcatgacctctttggtcttctcgtcaccgaacgtgtcttcgcgctaatcacgctgctcaccacctacgctgtggcagttttcctgctccgcctggccggcgtgcgcgatcgtgtgtgggaattcgtcgcattcgcagccctgctcgtgtccgcgccggtgtatttcacactcaatattgggcaaataaacgtcatgctcatggctttaacgcttttcgacgtcgccctcccccgcagcacgcgccattcaggcgtgctcaaatacgtgccactcggcgtactcaccggcattgccgctgcgatcaaactaaccccactagtgttcgggctgtatttcctcatcctgtgggtcgtgactaaatcaccacgcggactgtttggaatgattggtggcttcctcggggcatccgggcttgcaattattttccgaccatccattagcatccaatatttcaccgacgtgctgtttaccgcagaacgcatcggcgacctccacttcgcacgcaatgtctccatccgtgcggttttggaacgactccccgaacttggttccgcagcatctatcatgtggcttgttgctgtggcgctagtgatcatcgcagtcgcagttgctgcttaccgaatcctgcggacggatctctccgcgcacaatcgtctgctggctgtttccctcgtgtcgctcgttgcactgttgtgctcccccgtcagttggtaccaccactgggtgtggcttggtccgttaatcgtcgctctctggctaactcaacaccgctggctggctctatggggcgcattcgccgtgacattcggatcattccacaatttcctaccctcagaaaacaatatggagctcacctggccgtggtggatgcatgtcctcgcagcacattatttgatcttctccgcagtggttactgccgtatttagttgtgggaaaatgccccaaaaaacagagctttcccactaatcgatcaggagtatcacatc

SEQ ID NO: 2862 - protein, 412 aa, Corynebacterium glutamicum
VVPSLQQWRKPALILAILTVLGVLLTHWFAWPLTWPLGLRLPVDVEVYWQGAREFWLADDLYDIRYDTTFDNLPFTYPPFGALVFTPLWWIHDLFGLLVTERVFALITLLTTYAVAVFLLRLAGVRDRVWEFVAFAALLVSAPVYFTLNIGQINVMLMALTLFDVALPRSTRHSGVLKYVPLGVLTGIAAAIKLTPLVFGLYFLILWVVTKSPRGLFGMIGGFLGASGLAIIFRPSISIQYFTDVLFTAERIGDLHFARNVSIRAVLERLPELGSAASIMWLVAVALVIIAVAVAAYRILRTDLSAHNRLLAVSLVSLVALLCSPVSWYHHWVWLGPLIVALWLTQHRWLALWGAFAVTFGSFHNFLPSENNMELTWPWWMHVLAAHYLIFSAVVTAVFSCGKMPQKTELSH

SEQ ID NO: 2863 - DNA, 1423 bp, Corynebacterium glutamicum
  CDS (101)..(1408): RXA02701
cccactaatcgatcaggagtatcacatctccatgatttaagattaaaactttgtctaaacacgaacggtgttttcatgtttaagaaaaggactcctggttttgacgaacccccagacagcacatgctgccgcgtctgactccgcatcccagaaggaggctcctaatccttcactctccatcactgtaggtattaaagatctgctggggctgctttcagttcttggcattgcagcggggctgatagccaacaagattctcatcgaacgctacaactggcgcatcgatgccgcagtttaccgcgaaggcgcgttagcgctggtcaacggggaatcactgtacgcgcagccgtttgatatgggtgatatttcactaccctttatctacccaccgattggtgccatcctgtttgcgccttgggggtactttgatttcatcacagttgaacttgcgggaaaccttgttgtcataggctcatccctgctgttattactgtgcctgtatcttgtcaccaacgctgttcttagcggtcgagacaagctgttggccttcaccatcgctgcgatttcctggccgatcgctctctttgcagagccagtgtttttgaacgctgacttgggccaaatcaacattttgatcatggctttggttgtcatggacctgcttccgattaagcgcagaatcccccgaggtgtcctgattggccttgcagccgccatcaaaatcactccgctggccatgctgttgtatttcctggtgaagaaggatttccgcggaatcatcaatgcggtgatctcactacttgccttcactgctatcggtgctgtgctcgcatgggaaaacaccaaagagttcttctcttcaacccttctcaacttaagtgctgaaggcgattcaggcgtagacaccacgttccaatccaacagctcgattcaggccatgctgtatcgctggtggacctcaaaggcagatgccgaagcatcctcactgcccaccatcttgtggatcgtactgtccctgattgctgtggcggccgttgcctacctaatgcaccaactcttctccagaggattgcacgttgaggcagtcatggttaacgccatgctcatgctacttatctcccccatctcatggtctcaccactgggtgtggctaccgctgtgggctgtggtgttcttcgttcgataccgccagcaccgctctcacccgaagttcttgttgtggagcggagttatcttgagcgtcatgctgctgatgctgccaccaaaatggtggtttggccgcgatggcgtcaacgtcttcgaactgaatttctgggagaaactactcatctctgactggacgtggctctccatcgggctcatgatcaccttgggtcttgggctgaaagcatttcccaaaatatccaaatagataaaggtgtgg

SEQ ID NO: 2864 - protein, 436 aa, Corynebacterium glutamicum
LTNPQTAHAAASDSASQKEAPNPSLSITVGIKDLLGLLSVLGIAAGLIANKILIERYNWRIDAAVYREGALALVNGESLYAQPFDMGDISLPFIYPPIGAILFAPWGYFDFITVELAGNLVVIGSSLLLLLCLYLVTNAVLSGRDKLLAFTIAAISWPIALFAEPVFLNADLGQINILIMALVVMDLLPIKRRIPRGVLIGLAAAIKITPLAMLLYFLVKKDFRGIINAVISLLAFTAIGAVLAWENTKEFFSSTLLNLSAEGDSGVDTTFQSNSSIQAMLYRWWTSKADAEASSLPTILWIVLSLIAVAAVAYLMHQLFSRGLHVEAVMVNAMLMLLISPISWSHHWVWLPLWAVVFFVRYRQHRSHPKFLLWSGVILSVMLLMLPPKWWFGRDGVNVFELNFWEKLLISDWTWLSIGLMITLGLGLKAFPKISK

SEQ ID NO: 2865 - DNA, 918 bp, Corynebacterium glutamicum
  CDS (101)..(895): RXA02712
ctgaaacggcttcggaagctgaaattgaagaaaacccacgtgccgcacctgtgaaggtgcgcgcaatcgaaagaatcggcaacaactcaggagacctctcatgaccatgacaaatggctcccgcacagagtcgggaaagattcgcgatcgacgtgtcgctgacgctgatccacggtatggccgtcgcgtctcggtgagtagggatttctccacagcggaagcttcggggaggggcgcgtcgataagcacgcaacctcgtcgtgacatggcgccggaaaggcgccacacaacccgggccctagtgaaccctggcgtgcaaccaacgcgtaagcgtttgatgcagcacaagctgggctctcagcaggttatgtcggtgcgtggtcgccgcgttgaggcaaaacgtgctgatcctaaggtgatccagctgtctgtgctggtggttatcctgctgtgcgttggtgttggcgcgaccatgggtctgtccggaacgtctacacagcagactttccagttgcaggaacttcaggcaactgaaacggatttgagcaatcgcattgagtcgctcaaccgagatgtggaagatgctcgctcagcagcaaccttggcagcgaatgctacggagatgggcttggtatccccagtggaacctggcgtgctcgcagtgcaggaaaacggtgatgttgtggaggagcgcgaagcaaatccagagacacgccctatagttgacatcaatggacaacagacccgaccaaatcgggcatcaagcaaccctgacgagactaacgcagtgactgaaaacctccaggcgattccacaagaagcagcagctccgccgtatcagaccaacactgttccttatgctgcaaccaccggacaagcaggtggcgcagggcagtgactttccccagcaatggcaga

SEQ ID NO: 2866 - protein, 265 aa, Corynebacterium glutamicum
MTMTNGSRTESGKIRDRRVADADPRYGRRVSVSRDFSTAEASGRGASISTQPRRDMAPERRHTTRALVNPGVQPTRKRLMQHKLGSQQVMSVRGRRVEAKRADPKVIQLSVLVVILLCVGVGATMGLSGTSTQQTFQLQELQATETDLSNRIESLNRDVEDARSAATLAANATEMGLVSPVEPGVLAVQENGDVVEEREANPETRPIVDINGQQTRPNRASSNPDETNAVTENLQAIPQEAAAPPYQTNTVPYAATTGQAGGAGQ

SEQ ID NO: 2867 - DNA, 552 bp, Corynebacterium glutamicum
  CDS (101)..(529): RXA02714
cgcggtggtcttgcatgagaggccactacgcaccctcagagacaaactgaatggttggttctgtttatgccactgagttgctgggaaggggacttcaaggatgttccttggtacctataccccgaaactcgatgacaaaggcaggctgactcttccagcaaagttccgtgaggaccttgcggggggattgatggtcactaaaggtcaagaccacagtctcgcggtttatccgaaggaagaatttgcagcaagggctcgcaaggcagctgcagtttctaggacaaaccctgaggctcgtgcgtttatccgaaaccttgcagcaagcgcggatgaacaacgacccgacggccaggggcgcatcaccctttcggcagcgcaccgcacatatgcggggctgacaaaagagtgtgtcgttatcggttcggtggattttctggagatttgggacgctcaagcctgggccgcgtatcaggaagagacggaggctgccttctcagcagctgaagatgacgtccttggaggattgctctgatagttgggcaatgcttcgaa

SEQ ID NO: 2868 - protein, 143 aa, Corynebacterium glutamicum
MFLGTYTPKLDDKGRLTLPAKFREDLAGGLMVTKGQDHSLAVYPKEEFAARARKAAAVSRTNPEARAFIRNLAASADEQRPDGQGRITLSAAHRTYAGLTKECVVIGSVDFLEIWDAQAWAAYQEETEAAFSAAEDDVLGGLL

SEQ ID NO: 2869 - DNA, 513 bp, Corynebacterium glutamicum
  CDS (101)..(490): RXA02715
gtttttgtcgttattggcataacggggaacattctggatattctgggcgttaataaggcatagaagaaaaaatgtctctactaaccaccgggaggacatcgtgtcgctttcagagcaggagcaacgcgcactgcgcgaaattgagcaagcgctcatggcagatgatccgaaatttggaaaagcggttgcaagtaacaatggcctagcaggcggtgggtttacccttcggggaatcgcacttttcgtactcggacttgtccttcttgttgccggcgtcgcattaagccagcaaacattgtggttcgttgcgctcggaattatcggattcttagtcatgttcggatcgggagtgtggatgctgcgcgggggcggctccaacaaaatctccgtcacatcccgcacttccaatgcgaagaatcgccaacagggcaattccaccattggggacaaaatggaagaaaacttccgtcgacgattcgagggcaataagtaagaagtaactgaataagtctt

SEQ ID NO: 2870 - protein, 130 aa, Corynebacterium glutamicum
VSLSEQEQRALREIEQALMADDPKFGKAVASNNGLAGGGFTLRGIALFVLGLVLLVAGVALSQQTLWFVALGIIGFLVMFGSGVWMLRGGGSNKISVTSRTSNAKNRQQGNSTIGDKMEENFRRRFEGNK

SEQ ID NO: 2871 - DNA, 861 bp, Corynebacterium glutamicum
  CDS (101)..(838): RXA02721
ccgtgatgatcgtcgtgacgatcgccgcgatgaccgcggagacgacctggatgtacccagcttcctccagtaattaagaaggagaatagacttatccactatggatagtcttgacccccgcaaccgccccgtccgcaaggtcttcacgacccgtgccggcggggtttcgcagtccccgtatgcttccttcaaccttggtgatcacgtcggcgacgatcctcaagctgtggcatccaaccgcaatcgcttggctgacatcatcggtttgtccccagacaaggtggtgtacatggagcaaattcattccaataccgtcacagtcattgatgaagccccagcggatggccaggctgtagaggccaccgatgcgctagtgaccacgcaacgagggctagcgctggccgttttggttgctgattgcgtgccagtgctgctgtcagacaccgacgctggcgtgattgcggcagtgcatgcaggccgcatgggagcccgcaatggcatcgtagctaaaaccattgcgaagatggaggagctcggcgcgaaacccagccgcattcatgcgctcatgggtgcagcggcatcgggtgcgaactacgaggtcccagaggccatggcgcgcgatgtggaagccaaacttccaggttccattgcgcgtacgacaaaaggcaccacaggactggacatccgcgcagggctgctgcgtcaaatgctcagcctgggtgtgcaaatgattgattctgatccacgctgcaccatcgaagacgaagatctgttttcttaccgccgcgaaggcacgacaggccgccaggccggcgtggtgtggctgccaaaggaggcataaattggagcgccgcgaagagc

SEQ ID NO: 2872 - protein, 246 aa, Corynebacterium glutamicum
MDSLDPRNRPVRKVFTTRAGGVSQSPYASFNLGDHVGDDPQAVASNRNRLADIIGLSPDKVVYMEQIHSNTVTVIDEAPADGQAVEATDALVTTQRGLALAVLVADCVPVLLSDTDAGVIAAVHAGRMGARNGIVAKTIAKMEELGAKPSRIHALMGAAASGANYEVPEAMARDVEAKLPGSIARTTKGTTGLDIRAGLLRQMLSLGVQMIDSDPRCTIEDEDLFSYRREGTTGRQAGVVWLPKEA

SEQ ID NO: 2873 - DNA, 735 bp, Corynebacterium glutamicum
  CDS (101)..(712): RXA02725
gaaagcccgctgcacatcggtgtggcgggttttctcatgcccagatattgaccttgtcactgtgtcaaggcattgaataagtgccatgaacataagtgccatggacaacttcgaacattcaaatgcatctatccgtttacaagcagcgttggccgcaggaactgctgaggacaccactgcgatcgatattcttttgtaccgcagtggggtagaagaagacttctttgtgcgcgacatgataacgtgggcgctcacccgcatgccagttgatgacgtgtttacctcactggtcgctgatttggattctgaggtacctgatcgaccattcggtgcaagtcaagcactccacacactctccaagttaagggtcgcgcagtcgtggcaggaattgcaagcacggccttggcttttgcaccgggaggacaccgcccaaactgcgtggcgaacctttgtgggactggtcccagatgatcagaccgcatggttggcgcaccaattgctccaagaattggataaaggaacgcctgaaattcagcggagtttaagtcgggcgatggcggaattggaggggagggaggcgtcgataagcgtgcttctaggcgctttaacgagcgcgcacgcggtggccaccgccaagctcattgcggatccggactccgatttcatggctgatctggaggaagcgcggcgcgtggataatatgggtgcatgctgatcggtgaggtgtccaagctc

SEQ ID NO: 2874 - protein, 204 aa, Corynebacterium glutamicum
MDNFEHSNASIRLQAALAAGTAEDTTAIDILLYRSGVEEDFFVRDMITWALTRMPVDDVFTSLVADLDSEVPDRPFGASQALHTLSKLRVAQSWQELQARPWLLHREDTAQTAWRTFVGLVPDDQTAWLAHQLLQELDKGTPEIQRSLSRAMAELEGREASISVLLGALTSAHAVATAKLIADPDSDFMADLEEARRVDNMGAC

SEQ ID NO: 2875 - DNA, 1035 bp, Corynebacterium glutamicum
  CDS (101)..(1012): RXA02727
gatcagttcctagatctcgttgaggacgccctcgttcagttccaagaggaaaacgaagacctaaagcagcaggtcgaagagctagaggcgcaggttgccggtggtccttcttccgctgctagttcctcaactgcaggtgcagccacagttgcagcttccaagtctgttgacgaggcagcgctgcgcaaggaaatcaaagagaagctgcgctccgaatacggcatccaagctcgatgatgcctccaaggccgctcagaaggctcaaaacgatgcgaagtccgctcaagatcagctacagcgtgcacaagctgacgcaaaggcagctcgcgacgaagctgaaaaggccaaggctgaagctaagtcagcagcatcctccagcaccactaaggcagcagcggttggcgctgtcggcgctggcaccggagcagcagttgctacaggtgctgcaaatgtggacacccacatgcaggcagcgaaggttctgggactcgcacaggaaatggcagaccgcctgacctcagaggctcgctccgaatccaagtccatgctggacgaggctcgcgaagcagcagagaagcagatcgaggaagcaaacagcacctccaaccgcactctggaagatgctcgcgcaaacgctgagaagcagatcgctgaagcgcagaaccgcgctgacactctggtcaacgaagctgacgctaaggctaagaacctggtttccgaagccgagaagaagtccgcagccaccctggccgcatccacctctcgtgcagaagctcagatccgtcaagccgaggacaaggcaaacgccctccaggcagacgcagagcgcaagcacaccgaaaccatggctgcagtcaaggaacagcagaatgctctggagacccgcatcgcggaactgcagaccttcgagcgtgagtaccgcacccgtctgaagtccctcctcgagggccagctggaagaactccacgcacgtggctcctctgcaccaaccaacaacaagccatctggtgagtaaaaagaaagattagttatctt

SEQ ID NO: 2876 - protein, 304 aa, Corynebacterium glutamicum
VVLLPLLVPQLQVQPQLQLPSLLTRQRCARKSKRSCAPNTASKLDDASKAAQKAQNDAKSAQDQLQRAQADAKAARDEAEKAKAEAKSAASSSTTKAAAVGAVGAGTGAAVATGAANVDTHMQAAKVLGLAQEMADRLTSEARSESKSMLDEAREAAEKQIEEANSTSNRTLEDARANAEKQIAEAQNRADTLVNEADAKAKNLVSEAEKKSAATLAASTSRAEAQIRQAEDKANALQADAERKHTETMAAVKEQQNALETRIAELQTFEREYRTRLKSLLEGQLEELHARGSSAPTNNKPSGE

SEQ ID NO: 2877 - DNA, 828 bp, Corynebacterium glutamicum
  CDS (101)..(805): RXA02735
gaggagcttcgccacatggatccagatttgggctaccagcacgcactatccggcttgtccagcgtcaagctggaaaccgtctaaggagaaatacaacactatggttgatgtagtacgcgcacgcgatactgaagatttggttgcacaggctgcctccaaattcattgaggttgttgaagcagcaactgccaataatggcaccgcacaggtagtgctcaccggtggtggcgccggcatcaagttgctggaaaagctcagcgttgatgcggctgaccttgcctgggatcgcattcatgtgttcttcggcgatgagcgcaatgtccctgtcagtgattctgagtccaatgagggccaggctcgtgaggcactgttgtccaaggtttctatccctgaagccaacattcacggatatggtctcggcgacgtagatcttgcagaggcagcccgcgcttacgaagctgtgttggatgaattcgcaccaaacggctttgatcttcacctgctcggcatgggtggcgaaggccatatcaactccctgttccctcacaccgatgcagtcaaggaatcctccgcaaaggtcatcgcggtgtttgattcccctaagcctccttcagagcgtgcaactctaacccttcctgcggttcactccgcaaagcgcgtgtggttgctggtttctggtgcggagaaggctgaggcagctgcggcgatcgtcaacggtgagcctgctgttgagtggcctgctgctggagctaccggatctgaggaaacggtattgttcttggctgatgatgctgcaggaaatctctaagcagcgccagctctaacaag

SEQ ID NO: 2878 - protein, 235 aa, Corynebacterium glutamicum
MVDVVRARDTEDLVAQAASKFIEVVEAATANNGTAQVVLTGGGAGIKLLEKLSVDAADLAWDRIHVFFGDERNVPVSDSESNEGQAREALLSKVSIPEANIHGYGLGDVDLAEAARAYEAVLDEFAPNGFDLHLLGMGGEGHINSLFPHTDAVKESSAKVIAVFDSPKPPSERATLTLPAVHSAKRVWLLVSGAEKAEAAAAIVNGEPAVEWPAAGATGSEETVLFLADDAAGNL

SEQ ID NO: 2879 - DNA, 1080 bp, Corynebacterium glutamicum
  CDS (101)..(1057): RXA02736
cagaggattacccagcgggtacgtggggtccaaagagcgctgatgaaatgctttcccgcaacggtcacacctggcgcaggccataatttaggggcaaaaaatgatctttgaacttccggataccaccacccagcaaatttccaagaccctaactcgactgcgtgaatcgggcacccaggtcaccaccggccgagtgctcaccctcatcgtggtcactgactccgaaagcgatgtcgctgcagttaccgagtccaccaatgaagcctcgcgcgagcacccatctcgcgtgatcattttggtggttggcgataaaactgcagaaaacaaagttgacgcagaagtccgtatcggtggcgacgctggtgcttccgagatgatcatcatgcatctcaacggacctgtcgctgacaagctccagtatgtcgtcacaccactgttgcttcctgacacccccatcgttgcttggtggccaggtgaatcaccaaagaatccttcccaggacccaattggacgcatcgcacaacgacgcatcactgatgctttgtacgaccgtgatgacgcactagaagatcgtgttgagaactatcacccaggtgataccgacatgacgtgggcgcgccttacccagtggcggggacttgttgcctcctcattggatcacccaccacacagcgaaatcacttccgtgaggctgaccggtgcaagcggcagtacctcggtggatttggctgcaggctggttggcgcggaggctgaaagtgcctgtgatccgcgaggtgacagatgctcccaccgtgccaaccgatgagtttggtactccactgctggctatccagcgcctggagatcgttcgcaccaccggctcgatcatcatcaccatctatgacgctcatacccttcaggtagagatgccggaatccggcaatgccccatcgctggtggctattggtcgtcgaagtgagtccgactgcttgtctgaggagcttcgccacatggatccagatttgggctaccagcacgcactatccggcttgtccagcgtcaagctggaaaccgtctaaggagaaatacaacactatgg

SEQ ID NO: 2880 - protein, 319 aa, Corynebacterium glutamicum
MIFELPDTTTQQISKTLTRLRESGTQVTTGRVLTLIVVTDSESDVAAVTESTNEASREHPSRVIILVVGDKTAENKVDAEVRIGGDAGASEMIIMHLNGPVADKLQYVVTPLLLPDTPIVAWWPGESPKNPSQDPIGRIAQRRITDALYDRDDALEDRVENYHPGDTDMTWARLTQWRGLVASSLDHPPHSEITSVRLTGASGSTSVDLAAGWLARRLKVPVIREVTDAPTVPTDEFGTPLLAIQRLEIVRTTGSIIITIYDAHTLQVEMPESGNAPSLVAIGRRSESDCLSEELRHMDPDLGYQHALSGLSSVKLETV

SEQ ID NO: 2881 - DNA, 597 bp, Corynebacterium glutamicum
  CDS (101)..(574): RXA02751
ggtgtcttcttgtcaaataaccactgtttatagggcaattctttggcaatgtacccaactcattacccacctgctgattcaaagagtagatttaaatagtgtgcttccgattgcctccggtaacgatgaccggaatttaatccgttatgtcgacggtggtcgatttgatgaaatcatgctcaccggagacctcactggcctgagcagttttcttaccaacgctggcccgaacgcccgggatgattttgatctcacggtgctcatgcgcgctgccgaggcaggcaacctcatggttgttgcccgcttgttagatttaggtgccaatccccgactcaccaatcctcgtggtgtcacggccctacatatcgcagcgatcgccggggacgatggcattgtggaatgcctcattgatgcaggcgctgaagtcgatgctgtagatgatcaaggtcgcactcccctatggaacgcagcggctcatcatctgcctgattctgcggtggtggatgtgctgcttcgcgcaggtgcgaatgtgaatctgcgcgattgcaatggagtcagcccagaagacatgctgtagaagcattctttagcaggatt

SEQ ID NO: 2882 - protein, 158 aa, Corynebacterium glutamicum
VLPIASGNDDRNLIRYVDGGRFDEIMLTGDLTGLSSFLTNAGPNARDDFDLTVLMRAAEAGNLMVVARLLDLGANPRLTNPRGVTALHIAAIAGDDGIVECLIDAGAEVDAVDDQGRTPLWNAAAHHLPDSAVVDVLLRAGANVNLRDCNGVSPEDML

SEQ ID NO: 2883 - DNA, 1014 bp, Corynebacterium glutamicum
  CDS (101)..(991): RXA02756
cgtgacggttgttgcaattccataactaaacgagctttgattaacaagtccttgtattgtgtaaatcgcttattgcacacaattgaaaaaggacattgttatgacaagcccttatggatcccaatacccaggcgacgacaacaataattggaactcccagttcggcaacccttccggcgagcagaactacggtcagccctacggtgcgccatatggacagccttacgggcagccatttgatcaaggattcaacgcctacagttctcccatcccacctgaggtcccacagccttccatgcaggaggctcagtggcgctcctttgaccttggaactgtttttggtcaggcatggaagggctttaccgcaacgtggcaggcatgggtgctgtctgcactgatctacttcgcggtgttgcttgtgctgatgtttgcgtggatcctcccgatggttagtgtgctcgcagcgacctcatctggttctgattccgcagctattgcagcgacgggtggcaccagcttcttcgggttcatgctgatgatcgtcctggcattcatcagttttgtgtactcccttaactgctaccgcaacgcggctcgagttgtgcgcggtgagcagatcaccattcagagtttcttcaagatgaagggtcttggtaaggcgctcggtatttacatcttgatcaatatcgtcatcttcatcggaatgatcttgctgctcattcctggaattatcgctgccgtggtgctgatctttgctgttcctgtggcattccagctgcgcgacgcctcgatcggtgatgcgttttccgcaagctggaaggcagtgtccaaaaacgttggtcaggtcattctcttagaactggctatcttcgcgttgagcttcttgggcagcgcagtgatcatcggtatgttggtgaccactccgcttacattcctgctgtatgcctacgcattccagaccgccagcggtggtcccatcatgcagcgtcagtagcagttagttttacttagtca

SEQ ID NO: 2884 - protein, 297 aa, Corynebacterium glutamicum
MTSPYGSQYPGDDNNNWNSQFGNPSGEQNYGQPYGAPYGQPYGQPFDQGFNAYSSPIPPEVPQPSMQEAQWRSFDLGTVFGQAWKGFTATWQAWVLSALIYFAVLLVLMFAWILPMVSVLAATSSGSDSAAIAATGGTSFFGFMLMIVLAFISFVYSLNCYRNAARVVRGEQITIQSFFKMKGLGKALGIYILINIVIFIGMILLLIPGIIAAVVLIFAVPVAFQLRDASIGDAFSASWKAVSKNVGQVILLELAIFALSFLGSAVIIGMLVTTPLTFLLYAYAFQTASGGPIMQRQ

SEQ ID NO: 2885 - DNA, 669 bp, Corynebacterium glutamicum
  CDS (101)..(646): RXA02757
ttcggatccttcgaccgttcaggcaatgcagatcgcgttgcacattccgaaacagaatccgccccggcggacagatgtgttggaagcggcggcgaggagtgtggtcaagctttgcctcgacgaacgagtatccaccgatcctgattttcgggcggccttggaacgttggtacggacacttgattcggaaggtgtcacgtcgcgctcgtaatgcggcgtgggatcgggtgcaagatttacccggcgtgactgtggaagatgatgctgcaaaggttcgggcatttttgcccagcgcagtggtggatgtgcctgcagatatcaaaaagctgcagatttccggtacggaattgcctctcgatgagccgaatccgatcaacgatgaataccccgttatctacattgatgaatcgttgaagatgacgctgggaaaggccgctgcgcaggtaggacacgcatccatgttgcttgccgcgcaccaaccgtttgagtgggtggagcagtgggaagcagcggattttgcgctgcacgtcagggagattccctcggaggagttcctgcgccttatcgagtctcctggtgctgttccagttcgcgatggcggctttactgaggttgcccccaacaccgtgacggttgttgcaattccataactaaacgagctttgattaac

SEQ ID NO: 2886 - protein, 182 aa, Corynebacterium glutamicum
VVKLCLDERVSTDPDFRAALERWYGHLIRKVSRRARNAAWDRVQDLPGVTVEDDAAKVRAFLPSAVVDVPADIKKLQISGTELPLDEPNPINDEYPVIYIDESLKMTLGKAAAQVGHASMLLAAHQPFEWVEQWEAADFALHVREIPSEEFLRLIESPGAVPVRDGGFTEVAPNTVTVVAIP

SEQ ID NO: 2887 - DNA, 882 bp, Corynebacterium glutamicum
  CDS (101)..(859): RXA02765
tctgaacttttccgcatcgacccagatgaggtttaccccgacgacgacgccacctgcgaattcaacccatggccgtatcctcgcggattttaggagataaatgtctaatcaattacccgatcacgtccgcgacgccttccaagtaggtgcgggacctgccgaacaactcggtcaagcttgggacttcggattccgcgtcggcaacactgtgttcgccaaagtgacggcgccggaagtgtcgggctggtcgtcgaaaacccgcgaaaccctgaaaccagaaggcgtgcgcgtcgtacgaccgatccgctccaccgacggccgatttgtggttgcggggtggcgcgcatcggtgttctctacgggaacgatcagcaagcgagtcgatgagacggtcgttgcgggtcttcgtttggcagatgcattagtggatacgcatgcaccggaacctgtggacaatgtgtttaaccgtgctgatgtgcaggcctgggaagagcagcccggtcgaatcggtgaattgttggagccgattaatcgcgtgaaccaggttggtcatgcggatatgttggcgacaacgctgtatgcgggaactcagccacctgcagtgacggatttggtgccagtgctgcgtccgcatggtttcactgcggcattggtgatcgttgatgggttgctgctgggtgcggttgatgagggaattctgcggaggttttcgcatttgccggaaattgagcagctggttttgagggcatttttgttccgtcgaaacttgcaggagttctctgagaacaacgatccgaatgttatttcgaacctaaacagggtggaatcgacactcgtgtcgtatgtttctgacaagatttgaggtatgtcggaatacaaacc

SEQ ID NO: 2888 - protein, 253 aa, Corynebacterium glutamicum
MSNQLPDHVRDAFQVGAGPAEQLGQAWDFGFRVGNTVFAKVTAPEVSGWSSKTRETLKPEGVRVVRPIRSTDGRFVVAGWRASVFSTGTISKRVDETVVAGLRLADALVDTHAPEPVDNVFNRADVQAWEEQPGRIGELLEPINRVNQVGHADMLATTLYAGTQPPAVTDLVPVLRPHGFTAALVIVDGLLLGAVDEGILRRFSHLPEIEQLVLRAFLFRRNLQEFSENNDPNVISNLNRVESTLVSYVSDKI

SEQ ID NO: 2889 - DNA, 516 bp, Corynebacterium glutamicum
  CDS (101)..(493): RXA02766
atttctcgccgcgccgcacggtgacgccggccatgttgagtgctagttcgcgcatgggtaacaccttactggcgtaaggccagggcttagactggtacccatgacaacctcagaaaatttttatgattctgtgggcggcgaggaaacgttttccctcatcgtccaccgtttttatgaacaggtccccaacgacgatattttaggcccgatgtatccgccggatgattttgagggcgccgagcagcgtctaaagatgttcctcagccagtactggggcggcccgaaggattatcaggagcagcgtggacaccctcgtctgcgcatgcgtcacgtcaattaccccatcggcgtcaccgcagcggagcgttggctgcagctcatgtccaatgcactcgacggcgtggatttgaccgcggagcagcgtgaagcgatttgggagcatatggtgcgcgcggccgatatgctgatcaattccaaccccgatccgcacgcttaacttctgccaaaaagtcgttt

SEQ ID NO: 2890 - protein, 131 aa, Corynebacterium glutamicum
MTTSENFYDSVGGEETFSLIVHRFYEQVPNDDILGPMYPPDDFEGAEQRLKMFLSQYWGGPKDYQEQRGHPRLRMRHVNYPIGVTAAERWLQLMSNALDGVDLTAEQREAIWEHMVRAADMLINSNPDPHA

SEQ ID NO: 2891 - DNA, 494 bp, Corynebacterium glutamicum
  CDS (1)..(471): RXA02774
ccctgcccaccaacacagaagctgctctatgcacagatgcgtgaaattgcagccgaacttacagcctgtgacgctactcgcggactccatgccgaagtggctgccgaatggcttagtgacgccataaccggcgaacccacctctatcgagattgacccccaccgcaacctgttctacgcacttaatgttgagcacccgcgactccatgaactctttgccggttacgctacacgccttgatgaactcgaccgcgcaccgcagcagtgtgagtcgcgtcaatattttcttgattatgtctgtgctgacaacccttttggctcagacaaaccagagggcattatcgtgctgctcgctgatcacgtgctggcagcagatccagtgacaaacaagccggcactcaaatcagaggcattccctactgtcacagactattgccgcactcactctgctaaaccaacagacattctcatttaaggattttagtcaccatgacg

SEQ ID NO: 2892 - protein, 157 aa, Corynebacterium glutamicum
PCPPTQKLLYAQMREIAAELTACDATRGLHAEVAAEWLSDAITGEPTSIEIDPHRNLFYALNVEHPRLHELFAGYATRLDELDRAPQQCESRQYFLDYVCADNPFGSDKPEGIIVLLADHVLAADPVTNKPALKSEAFPTVTDYCRTHSAKPTDILI

SEQ ID NO: 2893 - DNA, 348 bp, Corynebacterium glutamicum
  CDS (101)..(325): RXA02775
gcccccaccatctttggcactgagattgtgttcgattaactaccactgctgcacacacacatacaacacctctcacacacaaacaagaaagggtcaccccatgaccaccgttcaagtatccacccgcactgtgcgcgaacaccgttttactgtgccagtggactacgctgtcggcgccaccatttcagaaatctatgctgcctgtgccatggccgaaaagaaagccaacaaccttgggcttaacactactaaggacgattgggcacgagtcactgtcactgataatgctgttgtgttcattgtcgagaatgttatcgggaatacttagaattgtgtgctccttaacgg

SEQ ID NO: 2894 - protein, 75 aa, Corynebacterium glutamicum
MTTVQVSTRTVREHRFTVPVDYAVGATISEIYAACAMAEKKANNLGLNTTKDDWARVTVTDNAVVFIVENVIGNT

SEQ ID NO: 2895 - DNA, 465 bp, Corynebacterium glutamicum
  CDS (101)..(442): RXA02776
gcagcacctagcaatgcagccgaggcagccccttcaggttttgagccaggtacggctattcaagttgtataatccttcattcgatgatcaaacaccttcggtgctctatcctgttgaagcaggaacggtgtctctcgttgatgtaaagaaagcggctagccgtgcctttgaacagtgggaaaagcacaacgagtccgctggtgatgtcggtgatgatctttcactgcagagtatcgtagatctcattgagcgtgacactttccccaccgacgatgagcaagagctcaataatgtggctttgcttatcggcgaactcctggtgagggaggccggtggagagtggacgtcgtacatctcaaagaaaaatgatgaagatgaatcgctggagattttcggggtttttggcaccggtggcactgaaggattatctgtagtgggtaattgagttcgcatggttagtgaaaa

SEQ ID NO: 2896 - protein, 114 aa, Corynebacterium glutamicum
VLYPVEAGTVSLVDVKKAASRAFEQWEKHNESAGDVGDDLSLQSIVDLIERDTFPTDDEQELNNVALLIGELLVREAGGEWTSYISKKNDEDESLEIFGVFGTGGTEGLSVVGN

SEQ ID NO: 2897 - DNA, 1230 bp, Corynebacterium glutamicum
  CDS (101)..(1207): RXA02777
ggtcgcaccacaccaactactgtttcttctgtaatttgcactgaaactatcgcctacactgtcactgctaccatcacaatcggttgctagtaggctacaaatgaaccgcccccttcaaagtcaaaatttttcaataaccagcgaatgggcaaatgccacgttcaacgatatcgaagactctttggaggggtcttttgacatcgaaccaggccaatacattggacgcggagaatacttcgtagctacttctggaacgggttccaaaaagtttatcaaggtggttttgggtgacggtatcgatagcgaactaaatcgtcgcatcgaaggtgaaattcttgcaagtagtctccatcttccatccacagacctaatctctcctgtcgtaattcagtatgtgaaagagtcttctaattttcccggtgacttctacatcgtgtccgacttcaaagacgacacagaaactttagagctatctaaggcttctctacccctcactgacttagccaagatcggagcgtttctctttcgtttggaatctgtaacagttccccctcaaaatcctgcaaggcgagcaatggatgttttggatggactttctcttcttgcaaataaaggcaacattgaaacaggcgcacaattaacaaaaggaactatacaagctcttgaaatcattaatcaagaagcgaccaacatcgagaatgcacttgaaaaagtaactaaagtaggatcacggaagtttttctcgcatggagatcttaaattttctcagttcttaattaatggtgaaaccggaaagattttcctatgtgactgggaagaatgcggtagtgcacatttcgcaaatgacctatgttttctcgcaggtgatttgttctatagcacaattcgggaactggtggataccaacatcaaaaacattaaaggctcctcgatcattcaggaagcctacgataatgcaacgcttgaggctgtatcaaaagtaaatgcaatattaactggctattcctcagagaggggttactctctcacctcggacgaaaaacgaatcattagtatcagaatcggattggctggtctatttcgactttacactgtgagcgctaaatctaatgagttacgcccgcgcgaattagccttagcctccatcggaatgcaaattactttaggtcaagcacccaatctggtgtttacagatagcaaggtggtttaagtgaggaatttgcacgaaac

SEQ ID NO: 2898 - protein, 369 aa, Corynebacterium glutamicum
MNRPLQSQNFSITSEWANATFNDIEDSLEGSFDIEPGQYIGRGEYFVATSGTGSKKFIKVVLGDGIDSELNRRIEGEILASSLHLPSTDLISPVVIQYVKESSNFPGDFYIVSDFKDDTETLELSKASLPLTDLAKIGAFLFRLESVTVPPQNPARRAMDVLDGLSLLANKGNIETGAQLTKGTIQALEIINQEATNIENALEKVTKVGSRKFFSHGDLKFSQFLINGETGKIFLCDWEECGSAHFANDLCFLAGDLFYSTIRELVDTNIKNIKGSSIIQEAYDNATLEAVSKVNAILTGYSSERGYSLTSDEKRIISIRIGLAGLFRLYTVSAKSNELRPRELALASIGMQITLGQAPNLVFTDSKVV

SEQ ID NO: 2899 - DNA, 348 bp, Corynebacterium glutamicum
  CDS (101)..(325): RXA02778
ctccgatttctgaggtcagtacgcgctcctgtctaacttctaccacccagcccaaccaatcgtttttcaagggttcaccgaagcaactgttgagcacctcatgcaggtcattgagacgcttgatcccgatcagcgcgcagcggtgctcgctgcagcgataccgcgcgaggctaagatcctggggcgaaaagtaactcttcgccctggttggggcaatatgcgcgtacacgtcgtgattgcagttatctttatcaagtttttgcaaccggatcttcgccaggcgctgctaacaacaggtgatgccgtacttgtcgaagatgatacctgaggcgccttctggggcgtcga

SEQ ID NO: 2900 - protein, 75 aa, Corynebacterium glutamicum
MQVIETLDPDQRAAVLAAAIPREAKILGRKVTLRPGWGNMRVHVVIAVIFIKFLQPDLRQALLTTGDAVLVEDDT

SEQ ID NO: 2901 - DNA, 402 bp, Corynebacterium glutamicum
  CDS (101)..(379): RXA02779
ctcaaaggagactgcacatcatgttcctcaccaaagatatgctcgcacgttttcctgcaagtttgaatttgccaatgcacagtgctcagaaccagaagaaatgggcgaatacttccaggtcgttcaaaacatcgccatgacactgggtgctggcgaaagcgttgatcttgttgtccgcgaatacatcaacgatgtggaaggcaacccgaccatctatcacggtatgccgctgcgtactgaataccgcgcattcatcgaccttgatcactgtgatccgtccgctggtgagcctgagcctcgcttattgggggttactccctactggcacccctccgtgatggagaaagctcttcgcctttgcttcaagcgatgttggtgctgaattcggtcacatcaacgatg

SEQ ID NO: 2902 - protein, 93 aa, Corynebacterium glutamicum
MGEYFQVVQNIAMTLGAGESVDLVVREYINDVEGNPTIYHGMPLRTEYRAFIDLDHCDPSAGEPEPRLLGVTPYWHPSVMEKALRLCFKRCWC

SEQ ID NO: 2903 - DNA, 450 bp, Corynebacterium glutamicum
  CDS (101)..(427): RXA02780
atggagaaagctcttcgcctttgcttcaagcgatgttggtgctgaattcggtcacatcaacgatgattaccgcacctaccgtgcccacaaagacagcctcatgtccaagttccatacacaccgtgatgatgtcatttcacgtatcactgcactactaccccagcttcgtgcacaagagctgcaaggtcaatggtctgtggacatcatgaaaaacggggaggatttctacctcattgacatggctctcatgtgcgagtccgcactgtctgaactactcactgttacagatgagtacgccacagtcgagccgagtgtcatcaatgacttcgccaaccagctggtcattgattatgacgagcacgatatgggctttgatcgagactttccagcaggtgtgtataacacccgacaagcaagtgctatcaactaaaaaatacacacatccacacc

SEQ ID NO: 2904 - protein, 109 aa, Corynebacterium glutamicum
MSKFHTHRDDVISRITALLPQLRAQELQGQWSVDIMKNGEDFYLIDMALMCESALSELLTVTDEYATVEPSVINDFANQLVIDYDEHDMGFDRDFPAGVYNTRQASAIN

SEQ ID NO: 2905 - DNA, 672 bp, Corynebacterium glutamicum
  CDS (101)..(649): RXA02783
acaagcttcatgcaacccataacctcagtgctgttttgcctaccgaaactactgactcacgtgtggcaaccaccgctttcgccgtacactcacactgtcggtggtctctggttcacgcgctgctgcattcttgaacagcaaccatattcagggtgctgtctcggccactaagcactttgccctgtgcgacaacaacgacgatattcgagcactcctgtcggtgcgctcaccaaaaaacaatgcccgcatgtatcgcaaaaaaggcacatgggaaatccagcgctatgcgacactcggtaacgtccctggcggttttactaggctgctgaagtttgccgagcacacactcaacgaacacagcacagtactcaagcaatggatctcattttctgctgctgatgtctctgacggcagcctgtatcgaactgccggttttaccgccgagcaacagcttgcaccggattatcgctatgtcggtggcgcaacaggttggcgccgaacacccaaagaaagcttccagcgcaaacgctttagagacgacccagcgttgctatggaacgaatcttggacagagcacgaagcagcgctcaacaacgagctctacagaatctacgatgccggcaaaacccggtgggttaaaaatgttgcttgattctgcagattagttactga

SEQ ID NO: 2906 - protein, 183 aa, Corynebacterium glutamicum
VVSGSRAAAFLNSNHIQGAVSATKHFALCDNNDDIRALLSVRSPKNNARMYRKKGTWEIQRYATLGNVPGGFTRLLKFAEHTLNEHSTVLKQWISFSAADVSDGSLYRTAGFTAEQQLAPDYRYVGGATGWRRTPKESFQRKRFRDDPALLWNESWTEHEAALNNELYRIYDAGKTRWVKNVA

SEQ ID NO: 2907 - DNA, 309 bp, Corynebacterium glutamicum
  CDS (101)..(286): RXA02784
agctgcaactcaggtagaagaaacaacagtcgcccgagttgaacacgatacttacgacactattgctaaccagctacaagatgccggtgtctatgacgatgtggcctttgccgaaggctactaccaggaaatggctgaggttgtatgtgaagcacgcgaagagggtatcacccacgaggacaccctgcatatgctcaatgacatgatggcaatgaaacgatctggcgaagtactcaatacgctcgctgatgttctctatgcaaatgaatgccctgaatatcgaatctaaattgttggtcactctgcata

SEQ ID NO: 2908 - protein, 62 aa, Corynebacterium glutamicum
VAFAEGYYQEMAEVVCEAREEGITHEDTLHMLNDMMAMKRSGEVLNTLADVLYANECPEYRI

SEQ ID NO: 2909 - DNA, 830 bp, Corynebacterium glutamicum
  CDS (1)..(807): RXA02786
atcctgcgcaacctcggccaatcgctgggcagcctgcacgccgccaccgcagaccgcgaagaagacttcaacattctgctcaaccgtatgctggccaaatacccagccacagctgagatgcagaaaaaccgcgataggttgctgcccgcagcaattgaggtgggtaaaaagatacttgtcgacgccggggtcaccgttccagaagtcgtcgaggagtttgcccgcgtagctcggcgacgcctgatttccggacgccaccgtgccttcacaccttttgacttgtcacccgacaacatcatcgtggctgaacgcacccacttcctggactacgaagttgccggtttcagggatgccacctttgatgttgcttgtgtgatcgcaggtttcccgcaattcgtgttcagccgccccatctctgatgatgaggtagacgaactcattgaatcctgggtccaagaagtccgtggaatctggcccaatgtgaacaatgaagagcgcctccaagcacgtatcgtgaccgctctcatcggctgggcactatcgagtgttgccttcatgaagctcggctccatcagcggcatgcttaacctgctgcacgtcaccgaagatggaaacaccactttggatgtctccaaccttgatgaactgttgattccacgatctgccgaagatgacgagctggtccagcaagacctccacgacacgttctccgcgcttcagcgatttgcagcgcgcgggctggattccaggttccctgaggtggcacgattcgcagacgacgtggtgcgtttgttcctcaaaaatgactagctgaagagcaccggttgctt

SEQ ID NO: 2910 - protein, 269 aa, Corynebacterium glutamicum
ILRNLGQSLGSLHAATADREEDFNILLNRMLAKYPATAEMQKNRDRLLPAAIEVGKKILVDAGVTVPEVVEEFARVARRRLISGRHRAFTPFDLSPDNIIVAERTHFLDYEVAGFRDATFDVACVIAGFPQFVFSRPISDDEVDELIESWVQEVRGIWPNVNNEERLQARIVTALIGWALSSVAFMKLGSISGMLNLLHVTEDGNTTLDVSNLDELLIPRSAEDDELVQQDLHDTFSALQRFAARGLDSRFPEVARFADDVVRLFLKND

SEQ ID NO: 2911 - DNA, 669 bp, Corynebacterium glutamicum
  CDS (101)..(646): RXA02789
ttcttccgtacggctatgcttaaaagctaaatttgtctttgtgccttgcaacacattaatttcttaacactaaacaatggaaaggtaagcgggtttttctatgaaggtttccgccgatacacccggtcacgatgatccaggcccaggccggcgccttggcttagatgtcggcaccgtgcgcatcggagtggcagcctctgaccgcgatgccaagcttgccatgcctgtggaaaccgttccgcgggaaactggattcaaagggccagacctggccgatattgatcggttggtcgccatcgttgaggaatacaacgccgtggaagtcattgttggtctacccacagatctgcagggaaatggctccgccagtgtgaagcatgcaaaggaaattgctttccgcgtccgtcggcgcctcaccaatgctggaaagaacattccggtacggcttggcgacgaacgcctcaccaccgtcgtggccacccaagccttgcgggcctcaggagtcagcgaaaaagcgggacgtaaagttattgatcaagctgccgcagtagaaatccttcaaacctggttggatgctcgcacccgagcccttgaaccacaatccacagacacccaagatttcgacgagaagggaaatttcccaggatgaaccaaatccgaaaccgccgg

SEQ ID NO: 2912 - protein, 182 aa, Corynebacterium glutamicum
MKVSADTPGHDDPGPGRRLGLDVGTVRIGVAASDRDAKLAMPVETVPRETGFKGPDLADIDRLVAIVEEYNAVEVIVGLPTDLQGNGSASVKHAKEIAFRVRRRLTNAGKNIPVRLGDERLTTVVATQALRASGVSEKAGRKVIDQAAAVEILQTWLDARTRALEPQSTDTQDFDEKGNFPG

SEQ ID NO: 2913 - DNA, 825 bp, Corynebacterium glutamicum
  CDS (101)..(802): RXA02793
tgcatgctcctctagtgatgtggtggaaagtcaagggataaccgttgaaaactgtggctcggtggtgaattttgatagtccaccatcacacatcgccttgatgaaaagcgccgccgtacccacgcttgatgctttaggtgttttggatcgcgtggtgaccaaagctggtgccttcccagctgggtattacgacgccgatttatcggaaagagtcacggacatcccaacgctgtccaacaagatcgacgccagcggacacgtgttgatctcgaaagaagtcgttgttgccgccaacccagacattgttttcggcgaaactgacaccatcaaccgcgcatccatggcatcctcgaacatcccggtcgtggaggaaccagcattctgtggcagcatcgacggcgacgtgagttttgatgatgtctggtcacaaatctccacctatggcaccatttttgatcgctcgacagaagcagacgcatacattgcaacgttgaaggaacgtgtttctgaagtatcctcgcgggttactgactccggaaaaactgtggcggtgctctaccccaccatcggcggcggagtcacctacgcatacggccgcggatccatggccaacccacttgttgccgaagcaggcctgaccaacgttttcgcagaccaatccgaacgcgtctttgaggtcacggcagaagaactgatctccgaaaccccgactcatcatcgttttacacagcgacggttccccttcagacatcgtcgcagaggtgggcaatctccaagggtccagcgcactcactgctctgagtgagaacaaagtgctgcccatac

SEQ ID NO: 2914 - protein, 234 aa, Corynebacterium glutamicum
MKSAAVPTLDALGVLDRVVTKAGAFPAGYYDADLSERVTDIPTLSNKIDASGHVLISKEVVVAANPDIVFGETDTINRASMASSNIPVVEEPAFCGSIDGDVSFDDVWSQISTYGTIFDRSTEADAYIATLKERVSEVSSRVTDSGKTVAVLYPTIGGGVTYAYGRGSMANPLVAEAGLTNVFADQSERVFEVTAEELISETPTHHRFTQRRFPFRHRRRGGQSPRVQRTHCSE

SEQ ID NO: 2915 - DNA, 672 bp, Corynebacterium glutamicum
  CDS (101)..(649): RXA02796
gattattcatggaacatccttagcggagttatgcaaacgttttcataaggggttattccattctacgtcgatctttgtagaaggtggttattatggcttcatgagactgttcgcgtctatcactccgccgattgaagtcaccgagcatctgatcaacgcgcttcgtccctacaaggatgatctgcggtggtctgatccagacaattggcacatcacgttggcgttctatggagaattacctgatggggcagtcgaagatctcattgagcatctgacaagtgcagcccgaatcaatgaagaattcaccatcagaatcaaaggcgcaggctcatttaatcggaagaatttgtggatgggtgttggtggtgacaccaaagatctgcggcgactgatggctgattgtctgattgatcctgaggaacgccgacgccagcgtgcacacctgaccgtggcgaaaccaacgcagcgacagcgcagccgcgattgggatcctgtcatccccgatctggtccacgctctctctatatacgaaggccccgaatggccagtcgatgagattgaactggtgtcttctgaacctggaaaaggcagaagcggtgggccactgtatacaaccgtggccaccattgcgttgtcatctgcgctggtttaaaggctcaaccgcggaacggc

SEQ ID NO: 2916 - protein, 183 aa, Corynebacterium glutamicum
MRLFASITPPIEVTEHLINALRPYKDDLRWSDPDNWHITLAFYGELPDGAVEDLIEHLTSAARINEEFTIRIKGAGSFNRKNLWMGVGGDTKDLRRLMADCLIDPEERRRQRAHLTVAKPTQRQRSRDWDPVIPDLVHALSIYEGPEWPVDEIELVSSEPGKGRSGGPLYTTVATIALSSALV

SEQ ID NO: 2917 - DNA, 1548 bp, Corynebacterium glutamicum
  CDS (101)..(1525): RXA02798
gcatcaaaatcatgtgcattcatcattgctgatcatcatagacctgttggcaaatgaattcaccaattctttaaagctctcaccctctttagggaactgaatgcggtctgtactcgactactggatcatgactcttgcaccttccaccaatgcggtttcgcagcaaacaagaaggaacccttcccaagcgccgcgacttcttcatcgacttcacttctttgccggcattatctgcgcaccgttgattttcatcgctgcgctcaccggactggtgtatgcgttctcccccaccattgaaagcatctctaatcaggaaatgctcacggtctccaagtcggctagcgacacagctcttccggtgcgtgaacaagtgagcatcgcccaagaactccaccccgatttagatctctcaggtgtccggcttggcgatgattcctccaccacccgcgtcctcttcgccgacgagacgcttgctgaatccacagtccgcgccgtgtttgttgatccctacaccggcgagatcaccggtgataccacccaatacggaagctcagctgcactgccgtttcggcaatgggtctcgcaaggtcaccgcatgttgtggcttggtgaacctggacgtatttattccgaacttgcggcaagttggctcggagttttagccgtaggcggtttcgcattattgtggttgcgcaacaaaaagcccggccgcttgagaaagatggtgcgaactggtggccgtggtcgagtgaaaacgtatcgccgacatgcagcattgggcaccgtagcgggcttgggttttgtgttcctcacctttactggcctgacctggtcaacttatgcgggatccaacatcacggatttacgcacccaactcaattggacgcagccttccgttaacgcttctctaacagctgccccacaagtggacatgcatgatgaacacgcaggtcatcacatgcatatggagtcggcaacctcaggctcaggttctatagatctggtagcggccacggctatctccgaattacgcactcccctcaccattactcccccagcacaagatggcctcgcgtggactgccacagaaaaccgcgacgcctaccgattcaccactgacaccatcgctgttgatggcgacaccggaatgctgaccaaccgtttgaattccactgattggccattagctgctcaagcgagtgcatggctcatccagcttcacatgggcaccctgtttggccttcccaaccaggttgtacttgggctgttggctgcctcaataatcgtgatgatcggccttgggtattggatgctgtggcagcatcggccacgggaaggttggcctagcgctcccaagcgtgcaggatttgaaaaacccacctggggaactatcgcgttgggtgttgtggtgatcgcgtatgggcttctcgcgccactttttgcagtttcactgctcgtgtttattggattaagccttggagtgcggtttatttctcgtatgtccgggcgcgcggacacgtccaactaagaacaccaaaccacaccgcc

SEQ ID NO: 2918 - protein, 475 aa, Corynebacterium glutamicum
MRSVLDYWIMTLAPSTNAVSQQTRRNPSQAPRLLHRLHFFAGIICAPLIFIAALTGLVYAFSPTIESISNQEMLTVSKSASDTALPVREQVSIAQELHPDLDLSGVRLGDDSSTTRVLFADETLAESTVRAVFVDPYTGEITGDTTQYGSSAALPFRQWVSQGHRMLWLGEPGRIYSELAASWLGVLAVGGFALLWLRNKKPGRLRKMVRTGGRGRVKTYRRHAALGTVAGLGFVFLTFTGLTWSTYAGSNITDLRTQLNWTQPSVNASLTAAPQVDMHDEHAGHHMHMESATSGSGSIDLVAATAISELRTPLTITPPAQDGLAWTATENRDAYRFTTDTIAVDGDTGMLTNRLNSTDWPLAAQASAWLIQLHMGTLFGLPNQVVLGLLAASIIVMIGLGYWMLWQHRPREGWPSAPKRAGFEKPTWGTIALGVVVIAYGLLAPLFAVSLLVFIGLSLGVRFISRMSGRADTSN

SEQ ID NO: 2919 - DNA, 396 bp, Corynebacterium glutamicum
  CDS (101)..(373): RXA02799
tcgcgcgcaagtgttcagtaatatggactcccagtaacgggttttcatgacgcgttaaattttttagttgatcacagatacaccaatcaggagtagcgcagtggcacgcaacattgaagacatccagcgcgatattgagcgcacccgccgtcagttggcttccaccctcgacgagctggcagaccgcagcaagccttccaacttggtcgatgacgccaagaaccaggcaaccgcgaagctgcaggaatcaaacgtacagaaggtgctcctgggcgtcgctgctgtcgtcgtcggtgctgttgtattcagcgttgtgcgtggccgtaagaaggcaaacgatctgaaggaaatccagcgcctgctctccgagcgttaaattgcttttcgacggggcgt

SEQ ID NO: 2920 - protein, 91 aa, Corynebacterium glutamicum
VARNIEDIQRDIERTRRQLASTLDELADRSKPSNLVDDAKNQATAKLQESNVQKVLLGVAAVVVGAVVFSVVRGRKKANDLKEIQRLLSER

SEQ ID NO: 2921 - DNA, 552 bp, Corynebacterium glutamicum
  CDS (1)..(552): RXA02815
tggctgcgcagtaccaaagagttcgaagaccagcccgtgattccggcattcgaagtaatcgcaacggttgcctctgaattcgcaggcgacgacggcaactactccaacgaattccccgtggaagatctagtcggatacgttgacgccatcaccgaagccggcggatacgcagtcctggatcttcaacccggacgcgccaacttcctcgaccaagccaaaatgtatgaagaactcctcaaacgaccaaacgttggattggcgctagatcccgagtggaaaatcggacccgatgagcaacccatgacacgagtgggctctgcagatgccgccgaaatcaacgaagtatcccagtggctcgccgacctgaccgccgagaacgatcttccacaaaaggcatttgtactgcaccaattccaattggaaatgctcaccaatcgggatcaaatcaataccgatcacctggaactggctgtcgtgttgcacgcagatggacacggaaacgcaggggataagtacgcaacttggaacatgcttcgcgagggactgagcccg

SEQ ID NO: 2922 - protein, 184 aa, Corynebacterium glutamicum
WLRSTKEFEDQPVIPAFEVIATVASEFAGDDGNYSNEFPVEDLVGYVDAITEAGGYAVLDLQPGRANFLDQAKMYEELLKRPNVGLALDPEWKIGPDEQPMTRVGSADAAEINEVSQWLADLTAENDLPQKAFVLHQFQLEMLTNRDQINTDHLELAVVLHADGHGNAGDKYATWNMLREGLSP

SEQ ID NO: 2923 - DNA, 370 bp, Corynebacterium glutamicum
  CDS (101)..(370): RXA02823
  modified_base (7): a, t, c, or g
  modified_base (9): a, t, c, or g
ttatgtntntaaacagccagttgggggtcatgggggagcgccccgtgactggttaatgccccgatctgggacgtacagtaacaacgacactggaggtgccatgactgttagaaatcccgaccgtgaggcaatccgtcacggaaaaattacgacggaggcgctgcgtgagcgtcccgcatacccgacctgggcaatgaagctgaccatggccatcactggcctaatgtttggtggcttcgttcttgttcacatgatcggaaacctgaaaatcttcatgccggactacgcagccgattctgcgcatccgggtgaagcacaagtagatgtctacggcgagttcctgcgtgagatcggatccccgatcctccca

SEQ ID NO: 2924 - protein, 90 aa, Corynebacterium glutamicum
MTVRNPDREAIRHGKITTEALRERPAYPTWAMKLTMAITGLMFGGFVLVHMIGNLKIFMPDYAADSAHPGEAQVDVYGEFLREIGSPILP

SEQ ID NO: 2925 - DNA, 523 bp, Corynebacterium glutamicum
  CDS (101)..(523): RXA02827
  modified_base (309): a, t, c, or g
  modified_base (344): a, t, c, or g
  modified_base (347): a, t, c, or g
  modified_base (363): a, t, c, or g
  modified_base (406): a, t, c, or g
  modified_base (505): a, t, c, or g
cggtttacttttatttatcgaatgaatcatgtacatagaataataagcattaaagggggggcgggtaggaagaagcagccgtgtcgcatatgcttactttatgtatgagcagcagaagatccttaacgaagtcagtgaaaaacgtcttcaggcaatcaaagattttacagaactgggatctggattcaagattgcgatgcgggatctttccattcgcggtgcaggtaatctcttaggtgctcagcagcatggatttattgatgcagtcggtttcgatatgtattctcaaatgctaagcgaagctgtttntcgtaaacaaggaaagaatagtcaagtggagaagnccnctgttgagatcgaccncggtgtcgatgcgtatctacctgaaacatacgtggcagatcancggcagaaaatcgagatctataaacgaattcgtgaacttgattcgcaagaaatgctagatgaactagaagatgatctgctcgaccgttttggagaacanccagaagaagtagcacat

SEQ ID NO: 2926 - protein, 141 aa, Corynebacterium glutamicum
  MOD_RES (70): Phe, Ser, Tyr, or Cys
  MOD_RES (82)..(83): Ser, Pro, Thr, or Ala
  MOD_RES (88): Leu, Pro, His, or Arg
  MOD_RES (102): His or Gln
  MOD_RES (135): His or Gln
MYEQQKILNEVSEKRLQAIKDFTELGSGFKIAMRDLSIRGAGNLLGAQQHGFIDAVGFDMYSQMLSEAVXRKQGKNSQVEKXXVEIDXGVDAYLPETYVADXRQKIEIYKRIRELDSQEMLDELEDDLLDRFGEXPEEVAH

SEQ ID NO: 2927 - DNA, 356 bp, Corynebacterium glutamicum
  CDS (1)..(342): RXA02842
  modified_base (299): a, t, c, or g
gatgcgggatttgtgtacttcggtgaaatcgatgatgctggccatattttcggcctggcaggcgacgaataccgaggggggattcgcagggtcgacacccacgtgaagaaagttctttctgaagtgtcacgacgctccgacgagctcggggaggactggctggtagtgatcacaactgatcatggtcaccttgatgagggcgggcacggcggcaccaccgatcgggagcgagaatcctggatcatcacgtggagcccgcaccgggaactgccacagtggcctgaagaaattgcgccgcntgagctggcagaactgatgcttgtggagcgccgaaccttgaggtgattgtcactaaa

SEQ ID NO: 2928 - protein, 114 aa, Corynebacterium glutamicum
  MOD_RES (100): Leu, Pro, His, or Arg
DAGFVYFGEIDDAGHIFGLAGDEYRGGIRRVDTHVKKVLSEVSRRSDELGEDWLVVITTDHGHLDEGGHGGTTDRERESWIITWSPHRELPQWPEEIAPXELAELMLVERRTLR

SEQ ID NO: 2929 - DNA, 615 bp, Corynebacterium glutamicum
  CDS (1)..(615): RXA02845
gaggatcacacctcaatgctcacccacttttccgcagctgtcggcatgcatgaccgcgatccggctcgcttcccaggccagggcgacggttcctacccggatcttttttggctgtacaaaaacgccctcaacctggtcattagctcagtgttgttcacccgtgagcagatggacaacatgctcgatcagatggatgaacacttcacgcgcgcgggtatcccgcgcatcgcgattaatattgagcgccgcgacgacgccctgatgaacggctccctcgagcgtgcgctagagctgcaagagcttatcgacgcctcccagcacgacgatcccttcgacgactgcccaacctgccaaattgcaggaaaagcggcactcgcaatggcagcagatgattacgacgaaacccaaaacctcgtctcccaaatcatcagctacggatccatcggctgcgtcatggaaccagagaccaccctcgctgcgttcatgctgcgtgtgcttaagtccggcgatgctgattatgcccgctacctgcaagatgtcagtgcgaaggcaaacccagaattccagtcccttgattccgttggacgccacctagaattcctcggcatcactgga

SEQ ID NO: 2930 - protein, 205 aa, Corynebacterium glutamicum
EDHTSMLTHFSAAVGMHDRDPARFPGQGDGSYPDLFWLYKNALNLVISSVLFTREQMDNMLDQMDEHFTRAGIPRIAINIERRDDALMNGSLERALELQELIDASQHDDPFDDCPTCQIAGKAALAMAADDYDETQNLVSQIISYGSIGCVMEPETTLAAFMLRVLKSGDADYARYLQDVSAKANPEFQSLDSVGRHLEFLGITG

SEQ ID NO: 2931 - DNA, 499 bp, Corynebacterium glutamicum
  CDS (101)..(499): RXA02848
agcaaggaccgcaacaactggggcaacctggatgagcgtctgtctcgcccgaacacgtttaaccccagcgcgtttcagaatgtgaatttcttctagttacatgcagatcgttctggcttcgcagtccccgtcccgccgaagaatcctcaattcggcgggcgtcgagcccctcatccacccagctgatgttgatgaggacgcgctccttcactccctcaacggctctgcgccggaggagatcgtccgccagcttgcgctggctaaagcacaggtggttgcgccgtcctatccgggcgacgtcgtcatcggtggcgattccatgctgcttatcgacgccaccctccaaggcaagccgcacacccgcgaagccaccatcgaaagatggaaacaacaacgcggcaacaaggccacactgatcaccggccacgccatcatctttggcgatgaagtgatcgtggagtcctcctccaccaacattcatttcgccgaggccagcgat

SEQ ID NO: 2932 - protein, 133 aa, Corynebacterium glutamicum
MQIVLASQSPSRRRILNSAGVEPLIHPADVDEDALLHSLNGSAPEEIVRQLALAKAQVVAPSYPGDVVIGGDSMLLIDATLQGKPHTREATIERWKQQRGNKATLITGHAIIFGDEVIVESSSTNIHFAEASD

SEQ ID NO: 2933 - DNA, 18 bp, Artificial Sequence
  Description of Artificial Sequence: Synthetic primer
ggaaacagtatgaccatg

SEQ ID NO: 2934 - DNA, 17 bp, Artificial Sequence
  Description of Artificial Sequence: Synthetic primer
gtaaaacgacggccagt
